United States Patent Application Publication US 2026/0258407 A1, published September 3, 2026 (application 19/677,974).

The application's sequence listing, which the Patent Office published only in electronic form, follows.

SEQUENCE LISTING (3797 sequences)

SEQ ID NO: 1 - protein, 167 aa, Escherichia coli
  REGION 1..167: note = misc_feature - TadA*7.10 (ecTadA) polypeptide sequence
MSEVEFSHEYWMRHALTLAKRARDEREVPVGAVLVLNNRVIGEGWNRAIGLHDPTAHAEIMALRQGGLVMQNYRLIDATLYVTFEPCVMCAGAMIHSRIGRVVFGVRNAKTGAAGSLMDVLHYPGMNHRVEITEGILADECAALLCYFFRMPRQVFNAQKKAQSSTD

SEQ ID NO: 2 - DNA, 4092 bp, synthetic construct
  misc_feature 1..4092: note = BhCas12b GGSGGS-ABE8-Xten20at P153 polynucleotide sequence
  misc_feature 1..6: note = Kozak sequence
  misc_feature 7..57: note = Sequence encoding N-terminal nuclear localization signal
  misc_feature 58..513: note = Sequence encoding BhCas12b
  misc_feature 514..531: note = Sequence encoding a linker
  misc_feature 532..1029: note = Sequence encoding TadA*8
  misc_feature 1030..1089: note = Sequence encoding Xten20 linker
  misc_feature 1090..3954: note = Sequence encoding BhCas12b
  misc_feature 3955..4002: note = Sequence encoding C-terminal NLS
  misc_feature 4003..4008: note = Sequence encoding GS linker
  misc_feature 4009..4089: note = Sequence encoding 3x hemagglutinin (HA) tag
  source 1..4092: mol_type = other DNA
gccaccatggccccaaagaagaagcggaaggtcggtatccacggagtcccagcagccgccaccagatccttcatcctgaagatcgagcccaacgaggaagtgaagaaaggcctctggaaaacccacgaggtgctgaaccacggaatcgcctactacatgaatatcctgaagctgatccggcaagaggccatctacgagcaccacgagcaggaccccaagaatcccaagaaggtgtccaaggccgagatccaggccgagctgtgggatttcgtgctgaagatgcagaagtgcaacagcttcacacacgaggtggacaaggacgaggtgttcaacatcctgagagagctgtacgaggaactggtgcccagcagcgtggaaaagaagggcgaagccaaccagctgagcaacaagtttctgtaccctctggtggaccccaacagccagtctggaaagggaacagccagcagcggcagaaagcccagatggtacaacctgaagattgccggcgatcccggaggctctggaggaagctccgaagtcgagttttcccatgagtactggatgagacacgcattgactctcgcaaagagggctcgagatgaacgcgaggtgcccgtgggggcagtactcgtgctcaacaatcgcgtaatcggcgaaggttggaatagggcaatcggactccacgaccccactgcacatgcggaaatcatggcccttcgacagggagggcttgtgatgcagaattatcgactttatgatgcgacgctgtacgtcacgtttgaaccttgcgtaatgtgcgcgggagctatgattcactcccgcattggacgagttgtattcggtgttcgcaacgccaagacgggtgccgcaggttcactgatggacgtgctgcatcatccaggcatgaaccaccgggtagaaatcacagaaggcatattggcggacgaatgtgcggcgctgttgtgtcgtttttttcgcatgcccaggcgggtctttaacgcccagaaaaaagcacaatcctctactgacggctcttctggatctgaaacacctggcacaagcgagagcgccacccctgagagctctggctcctgggaagaagagaagaagaagtgggaagaagataagaaaaaggacccgctggccaagatcctgggcaagctggctgagtacggactgatccctctgttcatcccctacaccgacagcaacgagcccatcgtgaaagaaatcaagtggatggaaaagtcccggaaccagagcgtgcggcggctggataaggacatgttcattcaggccctggaacggttcctgagctgggagagctggaacctgaaagtgaaagaggaatacgagaaggtcgagaaagagtacaagaccctggaagagaggatcaaagaggacatccaggctctgaaggctctggaacagtatgagaaagagcggcaagaacagctgctgcgggacaccctgaacaccaacgagtaccggctgagcaagagaggccttagaggctggcgggaaatcatccagaaatggctgaaaatggacgagaacgagccctccgagaagtacctggaagtgttcaaggactaccagcggaagcaccctagagaggccggcgattacagcgtgtacgagttcctgtccaagaaagagaaccacttcatctggcggaatcaccctgagtacccctacctgtacgccaccttctgcgagatcgacaagaaaaagaaggacgccaagcagcaggccaccttcacactggccgatcctatcaatcaccctctgtgggtccgattcgaggaaagaagcggcagcaacctgaacaagtacagaatcctgaccgagcagctgcacaccgagaagctgaagaaaaagctgacagtgcagctggaccggctgatctaccctacagaatctggcggctgggaagagaagggcaaagtggacattgtgctgctgcccagccggcagttctacaaccagatcttcctggacatcgaggaaaagggcaagcacgccttcacctacaaggatgagagcatcaagttccctctgaagggcacactcggcggagccagagtgcagttcgacagagatcacctgagaagataccctcacaaggtggaaagcggcaacgtgggcagaatctacttcaacatgaccgtgaacatcgagcctacagagtccccagtgtccaagtctctgaagatccaccgggacgacttccccaaggtggtcaacttcaagcccaaagaactgaccgagtggatcaaggacagcaagggcaagaaactgaagtccggcatcgagtccctggaaatcggcctgagagtgatgagcatcgacctgggacagagacaggccgctgccgcctctattttcgaggtggtggatcagaagcccgacatcgaaggcaagctgtttttcccaatcaagggcaccgagctgtatgccgtgcacagagccagcttcaacatcaagctgcccggcgagacactggtcaagagcagagaagtgctgcggaaggccagagaggacaatctgaaactgatgaaccagaagctcaacttcctgcggaacgtgctgcacttccagcagttcgaggacatcaccgagagagagaagcgggtcaccaagtggatcagcagacaagagaacagcgacgtgcccctggtgtaccaggatgagctgatccagatccgcgagctgatgtacaagccttacaaggactgggtcgccttcctgaagcagctccacaagagactggaagtcgagatcggcaaagaagtgaagcactggcggaagtccctgagcgacggaagaaagggcctgtacggcatctccctgaagaacatcgacgagatcgatcggacccggaagttcctgctgagatggtccctgaggcctaccgaacctggcgaagtgcgtagactggaacccggccagagattcgccatcgaccagctgaatcacctgaacgccctgaaagaagatcggctgaagaagatggccaacaccatcatcatgcacgccctgggctactgctacgacgtgcggaagaagaaatggcaggctaagaaccccgcctgccagatcatcctgttcgaggatctgagcaactacaacccctacgaggaaaggtcccgcttcgagaacagcaagctcatgaagtggtccagacgcgagatccccagacaggttgcactgcagggcgagatctatggcctgcaagtgggagaagtgggcgctcagttcagcagcagattccacgccaagacaggcagccctggcatcagatgtagcgtcgtgaccaaagagaagctgcaggacaatcggttcttcaagaatctgcagagagagggcagactgaccctggacaaaatcgccgtgctgaaagagggcgatctgtacccagacaaaggcggcgagaagttcatcagcctgagcaaggatcggaagtgcgtgaccacacacgccgacatcaacgccgctcagaacctgcagaagcggttctggacaagaacccacggcttctacaaggtgtactgcaaggcctaccaggtggacggccagaccgtgtacatccctgagagcaaggaccagaagcagaagatcatcgaagagttcggcgagggctacttcattctgaaggacggggtgtacgaatgggtcaacgccggcaagctgaaaatcaagaagggcagctccaagcagagcagcagcgagctggtggatagcgacatcctgaaagacagcttcgacctggcctccgagctgaaaggcgaaaagctgatgctgtacagggaccccagcggcaatgtgttccccagcgacaaatggatggccgctggcgtgttcttcggaaagctggaacgcatcctgatcagcaagctgaccaaccagtactccatcagcaccatcgaggacgacagcagcaagcagtctatgaaaaggccggcggccacgaaaaaggccggccaggcaaaaaagaaaaagggatcctacccatacgatgttccagattacgcttatccctacgacgtgcctgattatgcatacccatatgatgtccccgactatgcctaa

SEQ ID NO: 3 - protein, 1361 aa, synthetic construct
  REGION 1..1361: note = BhCas12b GGSGGS-ABE8-Xten20at P153 polypeptide sequence
MAPKKKRKVGIHGVPAAATRSFILKIEPNEEVKKGLWKTHEVLNHGIAYYMNILKLIRQEAIYEHHEQDPKNPKKVSKAEIQAELWDFVLKMQKCNSFTHEVDKDEVFNILRELYEELVPSSVEKKGEANQLSNKFLYPLVDPNSQSGKGTASSGRKPRWYNLKIAGDPGGSGGSSEVEFSHEYWMRHALTLAKRARDEREVPVGAVLVLNNRVIGEGWNRAIGLHDPTAHAEIMALRQGGLVMQNYRLYDATLYVTFEPCVMCAGAMIHSRIGRVVFGVRNAKTGAAGSLMDVLHHPGMNHRVEITEGILADECAALLCRFFRMPRRVFNAQKKAQSSTDGSSGSETPGTSESATPESSGSWEEEKKKWEEDKKKDPLAKILGKLAEYGLIPLFIPYTDSNEPIVKEIKWMEKSRNQSVRRLDKDMFIQALERFLSWESWNLKVKEEYEKVEKEYKTLEERIKEDIQALKALEQYEKERQEQLLRDTLNTNEYRLSKRGLRGWREIIQKWLKMDENEPSEKYLEVFKDYQRKHPREAGDYSVYEFLSKKENHFIWRNHPEYPYLYATFCEIDKKKKDAKQQATFTLADPINHPLWVRFEERSGSNLNKYRILTEQLHTEKLKKKLTVQLDRLIYPTESGGWEEKGKVDIVLLPSRQFYNQIFLDIEEKGKHAFTYKDESIKFPLKGTLGGARVQFDRDHLRRYPHKVESGNVGRIYFNMTVNIEPTESPVSKSLKIHRDDFPKVVNFKPKELTEWIKDSKGKKLKSGIESLEIGLRVMSIDLGQRQAAAASIFEVVDQKPDIEGKLFFPIKGTELYAVHRASFNIKLPGETLVKSREVLRKAREDNLKLMNQKLNFLRNVLHFQQFEDITEREKRVTKWISRQENSDVPLVYQDELIQIRELMYKPYKDWVAFLKQLHKRLEVEIGKEVKHWRKSLSDGRKGLYGISLKNIDEIDRTRKFLLRWSLRPTEPGEVRRLEPGQRFAIDQLNHLNALKEDRLKKMANTIIMHALGYCYDVRKKKWQAKNPACQIILFEDLSNYNPYEERSRFENSKLMKWSRREIPRQVALQGEIYGLQVGEVGAQFSSRFHAKTGSPGIRCSVVTKEKLQDNRFFKNLQREGRLTLDKIAVLKEGDLYPDKGGEKFISLSKDRKCVTTHADINAAQNLQKRFWTRTHGFYKVYCKAYQVDGQTVYIPESKDQKQKIIEEFGEGYFILKDGVYEWVNAGKLKIKKGSSKQSSSELVDSDILKDSFDLASELKGEKLMLYRDPSGNVFPSDKWMAAGVFFGKLERILISKLTNQYSISTIEDDSSKQSMKRPAATKKAGQAKKKKGSYPYDVPDYAYPYDVPDYAYPYDVPDYA

SEQ ID NO: 4 - DNA, 4092 bp, synthetic construct
  misc_feature 1..4092: note = BhCas12b GGSGGS-ABE8-Xten20at K255 polynucleotide sequence
  misc_feature 1..6: note = Kozak sequence
  misc_feature 7..57: note = Sequence encoding N-terminal nuclear localization signal (NLS)
  misc_feature 58..822: note = Sequence encoding BhCas12b
  misc_feature 823..840: note = Sequence encoding a linker
  misc_feature 841..1338: note = Sequence encoding TadA*8
  misc_feature 1339..1398: note = Sequence encoding Xten20 linker
  misc_feature 1399..3954: note = Sequence encoding BhCas12b
  misc_feature 3955..4002: note = Sequence encoding C-terminal NLS
  misc_feature 4003..4008: note = Sequence encoding a GS linker
  misc_feature 4009..4089: note = Sequence encoding 3x hemagglutinin (HA) tag
  source 1..4092: mol_type = other DNA
gccaccatggccccaaagaagaagcggaaggtcggtatccacggagtcccagcagccgccaccagatccttcatcctgaagatcgagcccaacgaggaagtgaagaaaggcctctggaaaacccacgaggtgctgaaccacggaatcgcctactacatgaatatcctgaagctgatccggcaagaggccatctacgagcaccacgagcaggaccccaagaatcccaagaaggtgtccaaggccgagatccaggccgagctgtgggatttcgtgctgaagatgcagaagtgcaacagcttcacacacgaggtggacaaggacgaggtgttcaacatcctgagagagctgtacgaggaactggtgcccagcagcgtggaaaagaagggcgaagccaaccagctgagcaacaagtttctgtaccctctggtggaccccaacagccagtctggaaagggaacagccagcagcggcagaaagcccagatggtacaacctgaagattgccggcgatccctcctgggaagaagagaagaagaagtgggaagaagataagaaaaaggacccgctggccaagatcctgggcaagctggctgagtacggactgatccctctgttcatcccctacaccgacagcaacgagcccatcgtgaaagaaatcaagtggatggaaaagtcccggaaccagagcgtgcggcggctggataaggacatgttcattcaggccctggaacggttcctgagctgggagagctggaacctgaaagtgaaagaggaatacgagaaggtcgagaaagagtacaagaccctggaagagaggatcaaaggaggctctggaggaagctccgaagtcgagttttcccatgagtactggatgagacacgcattgactctcgcaaagagggctcgagatgaacgcgaggtgcccgtgggggcagtactcgtgctcaacaatcgcgtaatcggcgaaggttggaatagggcaatcggactccacgaccccactgcacatgcggaaatcatggcccttcgacagggagggcttgtgatgcagaattatcgactttatgatgcgacgctgtacgtcacgtttgaaccttgcgtaatgtgcgcgggagctatgattcactcccgcattggacgagttgtattcggtgttcgcaacgccaagacgggtgccgcaggttcactgatggacgtgctgcatcatccaggcatgaaccaccgggtagaaatcacagaaggcatattggcggacgaatgtgcggcgctgttgtgtcgtttttttcgcatgcccaggcgggtctttaacgcccagaaaaaagcacaatcctctactgacggctcttctggatctgaaacacctggcacaagcgagagcgccacccctgagagctctggcgaggacatccaggctctgaaggctctggaacagtatgagaaagagcggcaagaacagctgctgcgggacaccctgaacaccaacgagtaccggctgagcaagagaggccttagaggctggcgggaaatcatccagaaatggctgaaaatggacgagaacgagccctccgagaagtacctggaagtgttcaaggactaccagcggaagcaccctagagaggccggcgattacagcgtgtacgagttcctgtccaagaaagagaaccacttcatctggcggaatcaccctgagtacccctacctgtacgccaccttctgcgagatcgacaagaaaaagaaggacgccaagcagcaggccaccttcacactggccgatcctatcaatcaccctctgtgggtccgattcgaggaaagaagcggcagcaacctgaacaagtacagaatcctgaccgagcagctgcacaccgagaagctgaagaaaaagctgacagtgcagctggaccggctgatctaccctacagaatctggcggctgggaagagaagggcaaagtggacattgtgctgctgcccagccggcagttctacaaccagatcttcctggacatcgaggaaaagggcaagcacgccttcacctacaaggatgagagcatcaagttccctctgaagggcacactcggcggagccagagtgcagttcgacagagatcacctgagaagataccctcacaaggtggaaagcggcaacgtgggcagaatctacttcaacatgaccgtgaacatcgagcctacagagtccccagtgtccaagtctctgaagatccaccgggacgacttccccaaggtggtcaacttcaagcccaaagaactgaccgagtggatcaaggacagcaagggcaagaaactgaagtccggcatcgagtccctggaaatcggcctgagagtgatgagcatcgacctgggacagagacaggccgctgccgcctctattttcgaggtggtggatcagaagcccgacatcgaaggcaagctgtttttcccaatcaagggcaccgagctgtatgccgtgcacagagccagcttcaacatcaagctgcccggcgagacactggtcaagagcagagaagtgctgcggaaggccagagaggacaatctgaaactgatgaaccagaagctcaacttcctgcggaacgtgctgcacttccagcagttcgaggacatcaccgagagagagaagcgggtcaccaagtggatcagcagacaagagaacagcgacgtgcccctggtgtaccaggatgagctgatccagatccgcgagctgatgtacaagccttacaaggactgggtcgccttcctgaagcagctccacaagagactggaagtcgagatcggcaaagaagtgaagcactggcggaagtccctgagcgacggaagaaagggcctgtacggcatctccctgaagaacatcgacgagatcgatcggacccggaagttcctgctgagatggtccctgaggcctaccgaacctggcgaagtgcgtagactggaacccggccagagattcgccatcgaccagctgaatcacctgaacgccctgaaagaagatcggctgaagaagatggccaacaccatcatcatgcacgccctgggctactgctacgacgtgcggaagaagaaatggcaggctaagaaccccgcctgccagatcatcctgttcgaggatctgagcaactacaacccctacgaggaaaggtcccgcttcgagaacagcaagctcatgaagtggtccagacgcgagatccccagacaggttgcactgcagggcgagatctatggcctgcaagtgggagaagtgggcgctcagttcagcagcagattccacgccaagacaggcagccctggcatcagatgtagcgtcgtgaccaaagagaagctgcaggacaatcggttcttcaagaatctgcagagagagggcagactgaccctggacaaaatcgccgtgctgaaagagggcgatctgtacccagacaaaggcggcgagaagttcatcagcctgagcaaggatcggaagtgcgtgaccacacacgccgacatcaacgccgctcagaacctgcagaagcggttctggacaagaacccacggcttctacaaggtgtactgcaaggcctaccaggtggacggccagaccgtgtacatccctgagagcaaggaccagaagcagaagatcatcgaagagttcggcgagggctacttcattctgaaggacggggtgtacgaatgggtcaacgccggcaagctgaaaatcaagaagggcagctccaagcagagcagcagcgagctggtggatagcgacatcctgaaagacagcttcgacctggcctccgagctgaaaggcgaaaagctgatgctgtacagggaccccagcggcaatgtgttccccagcgacaaatggatggccgctggcgtgttcttcggaaagctggaacgcatcctgatcagcaagctgaccaaccagtactccatcagcaccatcgaggacgacagcagcaagcagtctatgaaaaggccggcggccacgaaaaaggccggccaggcaaaaaagaaaaagggatcctacccatacgatgttccagattacgcttatccctacgacgtgcctgattatgcatacccatatgatgtccccgactatgcctaa

SEQ ID NO: 5 - protein, 1361 aa, synthetic construct
  REGION 1..1361: note = BhCas12b GGSGGS-ABE8-Xten20at K255 polypeptide sequence
MAPKKKRKVGIHGVPAAATRSFILKIEPNEEVKKGLWKTHEVLNHGIAYYMNILKLIRQEAIYEHHEQDPKNPKKVSKAEIQAELWDFVLKMQKCNSFTHEVDKDEVFNILRELYEELVPSSVEKKGEANQLSNKFLYPLVDPNSQSGKGTASSGRKPRWYNLKIAGDPSWEEEKKKWEEDKKKDPLAKILGKLAEYGLIPLFIPYTDSNEPIVKEIKWMEKSRNQSVRRLDKDMFIQALERFLSWESWNLKVKEEYEKVEKEYKTLEERIKGGSGGSSEVEFSHEYWMRHALTLAKRARDEREVPVGAVLVLNNRVIGEGWNRAIGLHDPTAHAEIMALRQGGLVMQNYRLYDATLYVTFEPCVMCAGAMIHSRIGRVVFGVRNAKTGAAGSLMDVLHHPGMNHRVEITEGILADECAALLCRFFRMPRRVFNAQKKAQSSTDGSSGSETPGTSESATPESSGEDIQALKALEQYEKERQEQLLRDTLNTNEYRLSKRGLRGWREIIQKWLKMDENEPSEKYLEVFKDYQRKHPREAGDYSVYEFLSKKENHFIWRNHPEYPYLYATFCEIDKKKKDAKQQATFTLADPINHPLWVRFEERSGSNLNKYRILTEQLHTEKLKKKLTVQLDRLIYPTESGGWEEKGKVDIVLLPSRQFYNQIFLDIEEKGKHAFTYKDESIKFPLKGTLGGARVQFDRDHLRRYPHKVESGNVGRIYFNMTVNIEPTESPVSKSLKIHRDDFPKVVNFKPKELTEWIKDSKGKKLKSGIESLEIGLRVMSIDLGQRQAAAASIFEVVDQKPDIEGKLFFPIKGTELYAVHRASFNIKLPGETLVKSREVLRKAREDNLKLMNQKLNFLRNVLHFQQFEDITEREKRVTKWISRQENSDVPLVYQDELIQIRELMYKPYKDWVAFLKQLHKRLEVEIGKEVKHWRKSLSDGRKGLYGISLKNIDEIDRTRKFLLRWSLRPTEPGEVRRLEPGQRFAIDQLNHLNALKEDRLKKMANTIIMHALGYCYDVRKKKWQAKNPACQIILFEDLSNYNPYEERSRFENSKLMKWSRREIPRQVALQGEIYGLQVGEVGAQFSSRFHAKTGSPGIRCSVVTKEKLQDNRFFKNLQREGRLTLDKIAVLKEGDLYPDKGGEKFISLSKDRKCVTTHADINAAQNLQKRFWTRTHGFYKVYCKAYQVDGQTVYIPESKDQKQKIIEEFGEGYFILKDGVYEWVNAGKLKIKKGSSKQSSSELVDSDILKDSFDLASELKGEKLMLYRDPSGNVFPSDKWMAAGVFFGKLERILISKLTNQYSISTIEDDSSKQSMKRPAATKKAGQAKKKKGSYPYDVPDYAYPYDVPDYAYPYDVPDYA

SEQ ID NO: 6 - DNA, 4092 bp, synthetic construct
  misc_feature 1..4092: note = BhCas12b GGSGGS-ABE8-Xten20at D306 polynucleotide sequence
  misc_feature 1..6: note = Kozak sequence
  misc_feature 7..57: note = Sequence encoding N-terminal nuclear localization signal (NLS)
  misc_feature 58..975: note = Sequence encoding BhCas12b
  misc_feature 976..993: note = Sequence encoding a linker
  misc_feature 994..1491: note = Sequence encoding TadA*8
  misc_feature 1492..1551: note = Sequence encoding Xten20 linker
  misc_feature 1552..3954: note = Sequence encoding BhCas12b
  misc_feature 3955..4002: note = Sequence encoding C-terminal NLS
  misc_feature 4003..4008: note = Sequence encoding a GS linker
  misc_feature 4009..4089: note = Sequence encoding 3x hemagglutinin (HA) tag
  source 1..4092: mol_type = other DNA
gccaccatggccccaaagaagaagcggaaggtcggtatccacggagtcccagcagccgccaccagatccttcatcctgaagatcgagcccaacgaggaagtgaagaaaggcctctggaaaacccacgaggtgctgaaccacggaatcgcctactacatgaatatcctgaagctgatccggcaagaggccatctacgagcaccacgagcaggaccccaagaatcccaagaaggtgtccaaggccgagatccaggccgagctgtgggatttcgtgctgaagatgcagaagtgcaacagcttcacacacgaggtggacaaggacgaggtgttcaacatcctgagagagctgtacgaggaactggtgcccagcagcgtggaaaagaagggcgaagccaaccagctgagcaacaagtttctgtaccctctggtggaccccaacagccagtctggaaagggaacagccagcagcggcagaaagcccagatggtacaacctgaagattgccggcgatccctcctgggaagaagagaagaagaagtgggaagaagataagaaaaaggacccgctggccaagatcctgggcaagctggctgagtacggactgatccctctgttcatcccctacaccgacagcaacgagcccatcgtgaaagaaatcaagtggatggaaaagtcccggaaccagagcgtgcggcggctggataaggacatgttcattcaggccctggaacggttcctgagctgggagagctggaacctgaaagtgaaagaggaatacgagaaggtcgagaaagagtacaagaccctggaagagaggatcaaagaggacatccaggctctgaaggctctggaacagtatgagaaagagcggcaagaacagctgctgcgggacaccctgaacaccaacgagtaccggctgagcaagagaggccttagaggctggcgggaaatcatccagaaatggctgaaaatggacggaggctctggaggaagctccgaagtcgagttttcccatgagtactggatgagacacgcattgactctcgcaaagagggctcgagatgaacgcgaggtgcccgtgggggcagtactcgtgctcaacaatcgcgtaatcggcgaaggttggaatagggcaatcggactccacgaccccactgcacatgcggaaatcatggcccttcgacagggagggcttgtgatgcagaattatcgactttatgatgcgacgctgtacgtcacgtttgaaccttgcgtaatgtgcgcgggagctatgattcactcccgcattggacgagttgtattcggtgttcgcaacgccaagacgggtgccgcaggttcactgatggacgtgctgcatcatccaggcatgaaccaccgggtagaaatcacagaaggcatattggcggacgaatgtgcggcgctgttgtgtcgtttttttcgcatgcccaggcgggtctttaacgcccagaaaaaagcacaatcctctactgacggctcttctggatctgaaacacctggcacaagcgagagcgccacccctgagagctctggcgagaacgagccctccgagaagtacctggaagtgttcaaggactaccagcggaagcaccctagagaggccggcgattacagcgtgtacgagttcctgtccaagaaagagaaccacttcatctggcggaatcaccctgagtacccctacctgtacgccaccttctgcgagatcgacaagaaaaagaaggacgccaagcagcaggccaccttcacactggccgatcctatcaatcaccctctgtgggtccgattcgaggaaagaagcggcagcaacctgaacaagtacagaatcctgaccgagcagctgcacaccgagaagctgaagaaaaagctgacagtgcagctggaccggctgatctaccctacagaatctggcggctgggaagagaagggcaaagtggacattgtgctgctgcccagccggcagttctacaaccagatcttcctggacatcgaggaaaagggcaagcacgccttcacctacaaggatgagagcatcaagttccctctgaagggcacactcggcggagccagagtgcagttcgacagagatcacctgagaagataccctcacaaggtggaaagcggcaacgtgggcagaatctacttcaacatgaccgtgaacatcgagcctacagagtccccagtgtccaagtctctgaagatccaccgggacgacttccccaaggtggtcaacttcaagcccaaagaactgaccgagtggatcaaggacagcaagggcaagaaactgaagtccggcatcgagtccctggaaatcggcctgagagtgatgagcatcgacctgggacagagacaggccgctgccgcctctattttcgaggtggtggatcagaagcccgacatcgaaggcaagctgtttttcccaatcaagggcaccgagctgtatgccgtgcacagagccagcttcaacatcaagctgcccggcgagacactggtcaagagcagagaagtgctgcggaaggccagagaggacaatctgaaactgatgaaccagaagctcaacttcctgcggaacgtgctgcacttccagcagttcgaggacatcaccgagagagagaagcgggtcaccaagtggatcagcagacaagagaacagcgacgtgcccctggtgtaccaggatgagctgatccagatccgcgagctgatgtacaagccttacaaggactgggtcgccttcctgaagcagctccacaagagactggaagtcgagatcggcaaagaagtgaagcactggcggaagtccctgagcgacggaagaaagggcctgtacggcatctccctgaagaacatcgacgagatcgatcggacccggaagttcctgctgagatggtccctgaggcctaccgaacctggcgaagtgcgtagactggaacccggccagagattcgccatcgaccagctgaatcacctgaacgccctgaaagaagatcggctgaagaagatggccaacaccatcatcatgcacgccctgggctactgctacgacgtgcggaagaagaaatggcaggctaagaaccccgcctgccagatcatcctgttcgaggatctgagcaactacaacccctacgaggaaaggtcccgcttcgagaacagcaagctcatgaagtggtccagacgcgagatccccagacaggttgcactgcagggcgagatctatggcctgcaagtgggagaagtgggcgctcagttcagcagcagattccacgccaagacaggcagccctggcatcagatgtagcgtcgtgaccaaagagaagctgcaggacaatcggttcttcaagaatctgcagagagagggcagactgaccctggacaaaatcgccgtgctgaaagagggcgatctgtacccagacaaaggcggcgagaagttcatcagcctgagcaaggatcggaagtgcgtgaccacacacgccgacatcaacgccgctcagaacctgcagaagcggttctggacaagaacccacggcttctacaaggtgtactgcaaggcctaccaggtggacggccagaccgtgtacatccctgagagcaaggaccagaagcagaagatcatcgaagagttcggcgagggctacttcattctgaaggacggggtgtacgaatgggtcaacgccggcaagctgaaaatcaagaagggcagctccaagcagagcagcagcgagctggtggatagcgacatcctgaaagacagcttcgacctggcctccgagctgaaaggcgaaaagctgatgctgtacagggaccccagcggcaatgtgttccccagcgacaaatggatggccgctggcgtgttcttcggaaagctggaacgcatcctgatcagcaagctgaccaaccagtactccatcagcaccatcgaggacgacagcagcaagcagtctatgaaaaggccggcggccacgaaaaaggccggccaggcaaaaaagaaaaagggatcctacccatacgatgttccagattacgcttatccctacgacgtgcctgattatgcatacccatatgatgtccccgactatgcctaa

SEQ ID NO: 7 - protein, 1361 aa, synthetic construct
  REGION 1..1361: note = BhCas12b GGSGGS-ABE8-Xten20at D306 polypeptide sequence
MAPKKKRKVGIHGVPAAATRSFILKIEPNEEVKKGLWKTHEVLNHGIAYYMNILKLIRQEAIYEHHEQDPKNPKKVSKAEIQAELWDFVLKMQKCNSFTHEVDKDEVFNILRELYEELVPSSVEKKGEANQLSNKFLYPLVDPNSQSGKGTASSGRKPRWYNLKIAGDPSWEEEKKKWEEDKKKDPLAKILGKLAEYGLIPLFIPYTDSNEPIVKEIKWMEKSRNQSVRRLDKDMFIQALERFLSWESWNLKVKEEYEKVEKEYKTLEERIKEDIQALKALEQYEKERQEQLLRDTLNTNEYRLSKRGLRGWREIIQKWLKMDGGSGGSSEVEFSHEYWMRHALTLAKRARDEREVPVGAVLVLNNRVIGEGWNRAIGLHDPTAHAEIMALRQGGLVMQNYRLYDATLYVTFEPCVMCAGAMIHSRIGRVVFGVRNAKTGAAGSLMDVLHHPGMNHRVEITEGILADECAALLCRFFRMPRRVFNAQKKAQSSTDGSSGSETPGTSESATPESSGENEPSEKYLEVFKDYQRKHPREAGDYSVYEFLSKKENHFIWRNHPEYPYLYATFCEIDKKKKDAKQQATFTLADPINHPLWVRFEERSGSNLNKYRILTEQLHTEKLKKKLTVQLDRLIYPTESGGWEEKGKVDIVLLPSRQFYNQIFLDIEEKGKHAFTYKDESIKFPLKGTLGGARVQFDRDHLRRYPHKVESGNVGRIYFNMTVNIEPTESPVSKSLKIHRDDFPKVVNFKPKELTEWIKDSKGKKLKSGIESLEIGLRVMSIDLGQRQAAAASIFEVVDQKPDIEGKLFFPIKGTELYAVHRASFNIKLPGETLVKSREVLRKAREDNLKLMNQKLNFLRNVLHFQQFEDITEREKRVTKWISRQENSDVPLVYQDELIQIRELMYKPYKDWVAFLKQLHKRLEVEIGKEVKHWRKSLSDGRKGLYGISLKNIDEIDRTRKFLLRWSLRPTEPGEVRRLEPGQRFAIDQLNHLNALKEDRLKKMANTIIMHALGYCYDVRKKKWQAKNPACQIILFEDLSNYNPYEERSRFENSKLMKWSRREIPRQVALQGEIYGLQVGEVGAQFSSRFHAKTGSPGIRCSVVTKEKLQDNRFFKNLQREGRLTLDKIAVLKEGDLYPDKGGEKFISLSKDRKCVTTHADINAAQNLQKRFWTRTHGFYKVYCKAYQVDGQTVYIPESKDQKQKIIEEFGEGYFILKDGVYEWVNAGKLKIKKGSSKQSSSELVDSDILKDSFDLASELKGEKLMLYRDPSGNVFPSDKWMAAGVFFGKLERILISKLTNQYSISTIEDDSSKQSMKRPAATKKAGQAKKKKGSYPYDVPDYAYPYDVPDYAYPYDVPDYA

SEQ ID NO: 8 - DNA, 4092 bp, synthetic construct
  misc_feature 1..4092: note = BhCas12b GGSGGS-ABE8-Xten20at D980 polynucleotide sequence
  misc_feature 1..6: note = Kozak sequence
  misc_feature 7..57: note = Sequence encoding N-terminal nuclear localization signal (NLS)
  misc_feature 58..2997: note = Sequence encoding BhCas12b
  misc_feature 2998..3015: note = Sequence encoding a linker
  misc_feature 3016..3513: note = Sequence encoding TadA*8
  misc_feature 3514..3573: note = Sequence encoding Xten20 linker
  misc_feature 3574..3954: note = Sequence encoding BhCas12b
  misc_feature 3955..4002: note = Sequence encoding C-terminal NLS
  misc_feature 4003..4008: note = Sequence encoding a GS linker
  misc_feature 4009..4089: note = Sequence encoding 3x hemagglutinin (HA) tag
  source 1..4092: mol_type = other DNA
gccaccatggccccaaagaagaagcggaaggtcggtatccacggagtcccagcagccgccaccagatccttcatcctgaagatcgagcccaacgaggaagtgaagaaaggcctctggaaaacccacgaggtgctgaaccacggaatcgcctactacatgaatatcctgaagctgatccggcaagaggccatctacgagcaccacgagcaggaccccaagaatcccaagaaggtgtccaaggccgagatccaggccgagctgtgggatttcgtgctgaagatgcagaagtgcaacagcttcacacacgaggtggacaaggacgaggtgttcaacatcctgagagagctgtacgaggaactggtgcccagcagcgtggaaaagaagggcgaagccaaccagctgagcaacaagtttctgtaccctctggtggaccccaacagccagtctggaaagggaacagccagcagcggcagaaagcccagatggtacaacctgaagattgccggcgatccctcctgggaagaagagaagaagaagtgggaagaagataagaaaaaggacccgctggccaagatcctgggcaagctggctgagtacggactgatccctctgttcatcccctacaccgacagcaacgagcccatcgtgaaagaaatcaagtggatggaaaagtcccggaaccagagcgtgcggcggctggataaggacatgttcattcaggccctggaacggttcctgagctgggagagctggaacctgaaagtgaaagaggaatacgagaaggtcgagaaagagtacaagaccctggaagagaggatcaaagaggacatccaggctctgaaggctctggaacagtatgagaaagagcggcaagaacagctgctgcgggacaccctgaacaccaacgagtaccggctgagcaagagaggccttagaggctggcgggaaatcatccagaaatggctgaaaatggacgagaacgagccctccgagaagtacctggaagtgttcaaggactaccagcggaagcaccctagagaggccggcgattacagcgtgtacgagttcctgtccaagaaagagaaccacttcatctggcggaatcaccctgagtacccctacctgtacgccaccttctgcgagatcgacaagaaaaagaaggacgccaagcagcaggccaccttcacactggccgatcctatcaatcaccctctgtgggtccgattcgaggaaagaagcggcagcaacctgaacaagtacagaatcctgaccgagcagctgcacaccgagaagctgaagaaaaagctgacagtgcagctggaccggctgatctaccctacagaatctggcggctgggaagagaagggcaaagtggacattgtgctgctgcccagccggcagttctacaaccagatcttcctggacatcgaggaaaagggcaagcacgccttcacctacaaggatgagagcatcaagttccctctgaagggcacactcggcggagccagagtgcagttcgacagagatcacctgagaagataccctcacaaggtggaaagcggcaacgtgggcagaatctacttcaacatgaccgtgaacatcgagcctacagagtccccagtgtccaagtctctgaagatccaccgggacgacttccccaaggtggtcaacttcaagcccaaagaactgaccgagtggatcaaggacagcaagggcaagaaactgaagtccggcatcgagtccctggaaatcggcctgagagtgatgagcatcgacctgggacagagacaggccgctgccgcctctattttcgaggtggtggatcagaagcccgacatcgaaggcaagctgtttttcccaatcaagggcaccgagctgtatgccgtgcacagagccagcttcaacatcaagctgcccggcgagacactggtcaagagcagagaagtgctgcggaaggccagagaggacaatctgaaactgatgaaccagaagctcaacttcctgcggaacgtgctgcacttccagcagttcgaggacatcaccgagagagagaagcgggtcaccaagtggatcagcagacaagagaacagcgacgtgcccctggtgtaccaggatgagctgatccagatccgcgagctgatgtacaagccttacaaggactgggtcgccttcctgaagcagctccacaagagactggaagtcgagatcggcaaagaagtgaagcactggcggaagtccctgagcgacggaagaaagggcctgtacggcatctccctgaagaacatcgacgagatcgatcggacccggaagttcctgctgagatggtccctgaggcctaccgaacctggcgaagtgcgtagactggaacccggccagagattcgccatcgaccagctgaatcacctgaacgccctgaaagaagatcggctgaagaagatggccaacaccatcatcatgcacgccctgggctactgctacgacgtgcggaagaagaaatggcaggctaagaaccccgcctgccagatcatcctgttcgaggatctgagcaactacaacccctacgaggaaaggtcccgcttcgagaacagcaagctcatgaagtggtccagacgcgagatccccagacaggttgcactgcagggcgagatctatggcctgcaagtgggagaagtgggcgctcagttcagcagcagattccacgccaagacaggcagccctggcatcagatgtagcgtcgtgaccaaagagaagctgcaggacaatcggttcttcaagaatctgcagagagagggcagactgaccctggacaaaatcgccgtgctgaaagagggcgatctgtacccagacaaaggcggcgagaagttcatcagcctgagcaaggatcggaagtgcgtgaccacacacgccgacatcaacgccgctcagaacctgcagaagcggttctggacaagaacccacggcttctacaaggtgtactgcaaggcctaccaggtggacggaggctctggaggaagctccgaagtcgagttttcccatgagtactggatgagacacgcattgactctcgcaaagagggctcgagatgaacgcgaggtgcccgtgggggcagtactcgtgctcaacaatcgcgtaatcggcgaaggttggaatagggcaatcggactccacgaccccactgcacatgcggaaatcatggcccttcgacagggagggcttgtgatgcagaattatcgactttatgatgcgacgctgtacgtcacgtttgaaccttgcgtaatgtgcgcgggagctatgattcactcccgcattggacgagttgtattcggtgttcgcaacgccaagacgggtgccgcaggttcactgatggacgtgctgcatcatccaggcatgaaccaccgggtagaaatcacagaaggcatattggcggacgaatgtgcggcgctgttgtgtcgtttttttcgcatgcccaggcgggtctttaacgcccagaaaaaagcacaatcctctactgacggctcttctggatctgaaacacctggcacaagcgagagcgccacccctgagagctctggcggccagaccgtgtacatccctgagagcaaggaccagaagcagaagatcatcgaagagttcggcgagggctacttcattctgaaggacggggtgtacgaatgggtcaacgccggcaagctgaaaatcaagaagggcagctccaagcagagcagcagcgagctggtggatagcgacatcctgaaagacagcttcgacctggcctccgagctgaaaggcgaaaagctgatgctgtacagggaccccagcggcaatgtgttccccagcgacaaatggatggccgctggcgtgttcttcggaaagctggaacgcatcctgatcagcaagctgaccaaccagtactccatcagcaccatcgaggacgacagcagcaagcagtctatgaaaaggccggcggccacgaaaaaggccggccaggcaaaaaagaaaaagggatcctacccatacgatgttccagattacgcttatccctacgacgtgcctgattatgcatacccatatgatgtccccgactatgcctaa

SEQ ID NO: 9 - protein, 1361 aa, synthetic construct
  REGION 1..1361: note = BhCas12b GGSGGS-ABE8-Xten20at D980 polypeptide sequence
MAPKKKRKVGIHGVPAAATRSFILKIEPNEEVKKGLWKTHEVLNHGIAYYMNILKLIRQEAIYEHHEQDPKNPKKVSKAEIQAELWDFVLKMQKCNSFTHEVDKDEVFNILRELYEELVPSSVEKKGEANQLSNKFLYPLVDPNSQSGKGTASSGRKPRWYNLKIAGDPSWEEEKKKWEEDKKKDPLAKILGKLAEYGLIPLFIPYTDSNEPIVKEIKWMEKSRNQSVRRLDKDMFIQALERFLSWESWNLKVKEEYEKVEKEYKTLEERIKEDIQALKALEQYEKERQEQLLRDTLNTNEYRLSKRGLRGWREIIQKWLKMDENEPSEKYLEVFKDYQRKHPREAGDYSVYEFLSKKENHFIWRNHPEYPYLYATFCEIDKKKKDAKQQATFTLADPINHPLWVRFEERSGSNLNKYRILTEQLHTEKLKKKLTVQLDRLIYPTESGGWEEKGKVDIVLLPSRQFYNQIFLDIEEKGKHAFTYKDESIKFPLKGTLGGARVQFDRDHLRRYPHKVESGNVGRIYFNMTVNIEPTESPVSKSLKIHRDDFPKVVNFKPKELTEWIKDSKGKKLKSGIESLEIGLRVMSIDLGQRQAAAASIFEVVDQKPDIEGKLFFPIKGTELYAVHRASFNIKLPGETLVKSREVLRKAREDNLKLMNQKLNFLRNVLHFQQFEDITEREKRVTKWISRQENSDVPLVYQDELIQIRELMYKPYKDWVAFLKQLHKRLEVEIGKEVKHWRKSLSDGRKGLYGISLKNIDEIDRTRKFLLRWSLRPTEPGEVRRLEPGQRFAIDQLNHLNALKEDRLKKMANTIIMHALGYCYDVRKKKWQAKNPACQIILFEDLSNYNPYEERSRFENSKLMKWSRREIPRQVALQGEIYGLQVGEVGAQFSSRFHAKTGSPGIRCSVVTKEKLQDNRFFKNLQREGRLTLDKIAVLKEGDLYPDKGGEKFISLSKDRKCVTTHADINAAQNLQKRFWTRTHGFYKVYCKAYQVDGGSGGSSEVEFSHEYWMRHALTLAKRARDEREVPVGAVLVLNNRVIGEGWNRAIGLHDPTAHAEIMALRQGGLVMQNYRLYDATLYVTFEPCVMCAGAMIHSRIGRVVFGVRNAKTGAAGSLMDVLHHPGMNHRVEITEGILADECAALLCRFFRMPRRVFNAQKKAQSSTDGSSGSETPGTSESATPESSGGQTVYIPESKDQKQKIIEEFGEGYFILKDGVYEWVNAGKLKIKKGSSKQSSSELVDSDILKDSFDLASELKGEKLMLYRDPSGNVFPSDKWMAAGVFFGKLERILISKLTNQYSISTIEDDSSKQSMKRPAATKKAGQAKKKKGSYPYDVPDYAYPYDVPDYAYPYDVPDYA

SEQ ID NO: 10 - DNA, 4092 bp, synthetic construct
  misc_feature 1..4092: note = BhCas12b GGSGGS-ABE8-Xten20at K1019 polynucleotide sequence
  misc_feature 1..6: note = Kozak sequence
  misc_feature 7..57: note = Sequence encoding N-terminal nuclear localization signal (NLS)
  misc_feature 58..3114: note = Sequence encoding BhCas12b
  misc_feature 3115..3132: note = Sequence encoding a linker
  misc_feature 3133..3630: note = Sequence encoding TadA*8
  misc_feature 3631..3690: note = Sequence encoding Xten20 linker
  misc_feature 3691..3954: note = Sequence encoding BhCas12b
  misc_feature 3955..4002: note = Sequence encoding C-terminal NLS
  misc_feature 4003..4008: note = Sequence encoding GS linker
  misc_feature 4009..4089: note = Sequence encoding 3x hemagglutinin (HA) tag
  source 1..4092: mol_type = other DNA
gccaccatggccccaaagaagaagcggaaggtcggtatccacggagtcccagcagccgccaccagatccttcatcctgaagatcgagcccaacgaggaagtgaagaaaggcctctggaaaacccacgaggtgctgaaccacggaatcgcctactacatgaatatcctgaagctgatccggcaagaggccatctacgagcaccacgagcaggaccccaagaatcccaagaaggtgtccaaggccgagatccaggccgagctgtgggatttcgtgctgaagatgcagaagtgcaacagcttcacacacgaggtggacaaggacgaggtgttcaacatcctgagagagctgtacgaggaactggtgcccagcagcgtggaaaagaagggcgaagccaaccagctgagcaacaagtttctgtaccctctggtggaccccaacagccagtctggaaagggaacagccagcagcggcagaaagcccagatggtacaacctgaagattgccggcgatccctcctgggaagaagagaagaagaagtgggaagaagataagaaaaaggacccgctggccaagatcctgggcaagctggctgagtacggactgatccctctgttcatcccctacaccgacagcaacgagcccatcgtgaaagaaatcaagtggatggaaaagtcccggaaccagagcgtgcggcggctggataaggacatgttcattcaggccctggaacggttcctgagctgggagagctggaacctgaaagtgaaagaggaatacgagaaggtcgagaaagagtacaagaccctggaagagaggatcaaagaggacatccaggctctgaaggctctggaacagtatgagaaagagcggcaagaacagctgctgcgggacaccctgaacaccaacgagtaccggctgagcaagagaggccttagaggctggcgggaaatcatccagaaatggctgaaaatggacgagaacgagccctccgagaagtacctggaagtgttcaaggactaccagcggaagcaccctagagaggccggcgattacagcgtgtacgagttcctgtccaagaaagagaaccacttcatctggcggaatcaccctgagtacccctacctgtacgccaccttctgcgagatcgacaagaaaaagaaggacgccaagcagcaggccaccttcacactggccgatcctatcaatcaccctctgtgggtccgattcgaggaaagaagcggcagcaacctgaacaagtacagaatcctgaccgagcagctgcacaccgagaagctgaagaaaaagctgacagtgcagctggaccggctgatctaccctacagaatctggcggctgggaagagaagggcaaagtggacattgtgctgctgcccagccggcagttctacaaccagatcttcctggacatcgaggaaaagggcaagcacgccttcacctacaaggatgagagcatcaagttccctctgaagggcacactcggcggagccagagtgcagttcgacagagatcacctgagaagataccctcacaaggtggaaagcggcaacgtgggcagaatctacttcaacatgaccgtgaacatcgagcctacagagtccccagtgtccaagtctctgaagatccaccgggacgacttccccaaggtggtcaacttcaagcccaaagaactgaccgagtggatcaaggacagcaagggcaagaaactgaagtccggcatcgagtccctggaaatcggcctgagagtgatgagcatcgacctgggacagagacaggccgctgccgcctctattttcgaggtggtggatcagaagcccgacatcgaaggcaagctgtttttcccaatcaagggcaccgagctgtatgccgtgcacagagccagcttcaacatcaagctgcccggcgagacactggtcaagagcagagaagtgctgcggaaggccagagaggacaatctgaaactgatgaaccagaagctcaacttcctgcggaacgtgctgcacttccagcagttcgaggacatcaccgagagagagaagcgggtcaccaagtggatcagcagacaagagaacagcgacgtgcccctggtgtaccaggatgagctgatccagatccgcgagctgatgtacaagccttacaaggactgggtcgccttcctgaagcagctccacaagagactggaagtcgagatcggcaaagaagtgaagcactggcggaagtccctgagcgacggaagaaagggcctgtacggcatctccctgaagaacatcgacgagatcgatcggacccggaagttcctgctgagatggtccctgaggcctaccgaacctggcgaagtgcgtagactggaacccggccagagattcgccatcgaccagctgaatcacctgaacgccctgaaagaagatcggctgaagaagatggccaacaccatcatcatgcacgccctgggctactgctacgacgtgcggaagaagaaatggcaggctaagaaccccgcctgccagatcatcctgttcgaggatctgagcaactacaacccctacgaggaaaggtcccgcttcgagaacagcaagctcatgaagtggtccagacgcgagatccccagacaggttgcactgcagggcgagatctatggcctgcaagtgggagaagtgggcgctcagttcagcagcagattccacgccaagacaggcagccctggcatcagatgtagcgtcgtgaccaaagagaagctgcaggacaatcggttcttcaagaatctgcagagagagggcagactgaccctggacaaaatcgccgtgctgaaagagggcgatctgtacccagacaaaggcggcgagaagttcatcagcctgagcaaggatcggaagtgcgtgaccacacacgccgacatcaacgccgctcagaacctgcagaagcggttctggacaagaacccacggcttctacaaggtgtactgcaaggcctaccaggtggacggccagaccgtgtacatccctgagagcaaggaccagaagcagaagatcatcgaagagttcggcgagggctacttcattctgaaggacggggtgtacgaatgggtcaacgccggcaagggaggctctggaggaagctccgaagtcgagttttcccatgagtactggatgagacacgcattgactctcgcaaagagggctcgagatgaacgcgaggtgcccgtgggggcagtactcgtgctcaacaatcgcgtaatcggcgaaggttggaatagggcaatcggactccacgaccccactgcacatgcggaaatcatggcccttcgacagggagggcttgtgatgcagaattatcgactttatgatgcgacgctgtacgtcacgtttgaaccttgcgtaatgtgcgcgggagctatgattcactcccgcattggacgagttgtattcggtgttcgcaacgccaagacgggtgccgcaggttcactgatggacgtgctgcatcatccaggcatgaaccaccgggtagaaatcacagaaggcatattggcggacgaatgtgcggcgctgttgtgtcgtttttttcgcatgcccaggcgggtctttaacgcccagaaaaaagcacaatcctctactgacggctcttctggatctgaaacacctggcacaagcgagagcgccacccctgagagctctggcctgaaaatcaagaagggcagctccaagcagagcagcagcgagctggtggatagcgacatcctgaaagacagcttcgacctggcctccgagctgaaaggcgaaaagctgatgctgtacagggaccccagcggcaatgtgttccccagcgacaaatggatggccgctggcgtgttcttcggaaagctggaacgcatcctgatcagcaagctgaccaaccagtactccatcagcaccatcgaggacgacagcagcaagcagtctatgaaaaggccggcggccacgaaaaaggccggccaggcaaaaaagaaaaagggatcctacccatacgatgttccagattacgcttatccctacgacgtgcctgattatgcatacccatatgatgtccccgactatgcctaa

SEQ ID NO: 11 - protein, 1361 aa, synthetic construct
  REGION 1..1361: note = BhCas12b GGSGGS-ABE8-Xten20at K1019 polypeptide sequence
MAPKKKRKVGIHGVPAAATRSFILKIEPNEEVKKGLWKTHEVLNHGIAYYMNILKLIRQEAIYEHHEQDPKNPKKVSKAEIQAELWDFVLKMQKCNSFTHEVDKDEVFNILRELYEELVPSSVEKKGEANQLSNKFLYPLVDPNSQSGKGTASSGRKPRWYNLKIAGDPSWEEEKKKWEEDKKKDPLAKILGKLAEYGLIPLFIPYTDSNEPIVKEIKWMEKSRNQSVRRLDKDMFIQALERFLSWESWNLKVKEEYEKVEKEYKTLEERIKEDIQALKALEQYEKERQEQLLRDTLNTNEYRLSKRGLRGWREIIQKWLKMDENEPSEKYLEVFKDYQRKHPREAGDYSVYEFLSKKENHFIWRNHPEYPYLYATFCEIDKKKKDAKQQATFTLADPINHPLWVRFEERSGSNLNKYRILTEQLHTEKLKKKLTVQLDRLIYPTESGGWEEKGKVDIVLLPSRQFYNQIFLDIEEKGKHAFTYKDESIKFPLKGTLGGARVQFDRDHLRRYPHKVESGNVGRIYFNMTVNIEPTESPVSKSLKIHRDDFPKVVNFKPKELTEWIKDSKGKKLKSGIESLEIGLRVMSIDLGQRQAAAASIFEVVDQKPDIEGKLFFPIKGTELYAVHRASFNIKLPGETLVKSREVLRKAREDNLKLMNQKLNFLRNVLHFQQFEDITEREKRVTKWISRQENSDVPLVYQDELIQIRELMYKPYKDWVAFLKQLHKRLEVEIGKEVKHWRKSLSDGRKGLYGISLKNIDEIDRTRKFLLRWSLRPTEPGEVRRLEPGQRFAIDQLNHLNALKEDRLKKMANTIIMHALGYCYDVRKKKWQAKNPACQIILFEDLSNYNPYEERSRFENSKLMKWSRREIPRQVALQGEIYGLQVGEVGAQFSSRFHAKTGSPGIRCSVVTKEKLQDNRFFKNLQREGRLTLDKIAVLKEGDLYPDKGGEKFISLSKDRKCVTTHADINAAQNLQKRFWTRTHGFYKVYCKAYQVDGQTVYIPESKDQKQKIIEEFGEGYFILKDGVYEWVNAGKGGSGGSSEVEFSHEYWMRHALTLAKRARDEREVPVGAVLVLNNRVIGEGWNRAIGLHDPTAHAEIMALRQGGLVMQNYRLYDATLYVTFEPCVMCAGAMIHSRIGRVVFGVRNAKTGAAGSLMDVLHHPGMNHRVEITEGILADECAALLCRFFRMPRRVFNAQKKAQSSTDGSSGSETPGTSESATPESSGLKIKKGSSKQSSSELVDSDILKDSFDLASELKGEKLMLYRDPSGNVFPSDKWMAAGVFFGKLERILISKLTNQYSISTIEDDSSKQSMKRPAATKKAGQAKKKKGSYPYDVPDYAYPYDVPDYAYPYDVPDYA

SEQ ID NO: 12 - protein, 208 aa, Petromyzon marinus
  REGION 1..208: note = MISC_FEATURE - tr|A5H718|A5H718_PETMA Cytosine deaminase OS=Petromyzon marinusOX=7757 PE=2 SV=1 amino acid sequence; PmCDA1 polypeptide sequence
MTDAEYVRIHEKLDIYTFKKQFFNNKKSVSHRCYVLFELKRRGERRACFWGYAVNKPQSGTERGIHAEIFSIRKVEEYLRDNPGQFTINWYSSWSPCADCAEKILEWYNQELRGNGHTLKIWACKLYYEKNARNQIGLWNLRDNGVGLNVMVSEHYQCCRKIFIQSSHNQLNENRWLEKTLKRAEKRRSELSIMIQVKILHTTKSPAV

SEQ ID NO: 13 - DNA, 766 bp, Petromyzon marinus
  misc_feature 1..766: note = EF094822.1 Petromyzon marinus isolate PmCDA.21 cytosine deaminase mRNA, complete cds; PmCDA1 polynucleotide sequence
  source 1..766: mol_type = genomic DNA
tgacacgacacagccgtgtatatgaggaagggtagctggatggggggggggggaatacgttcagagaggacattagcgagcgtcttgttggtggccttgagtctagacacctgcagacatgaccgacgctgagtacgtgagaatccatgagaagttggacatctacacgtttaagaaacagtttttcaacaacaaaaaatccgtgtcgcatagatgctacgttctctttgaattaaaacgacggggtgaacgtagagcgtgtttttggggctatgctgtgaataaaccacagagcgggacagaacgtggaattcacgccgaaatctttagcattagaaaagtcgaagaatacctgcgcgacaaccccggacaattcacgataaattggtactcatcctggagtccttgtgcagattgcgctgaaaagatcttagaatggtataaccaggagctgcgggggaacggccacactttgaaaatctgggcttgcaaactctattacgagaaaaatgcgaggaatcaaattgggctgtggaacctcagagataacggggttgggttgaatgtaatggtaagtgaacactaccaatgttgcaggaaaatattcatccaatcgtcgcacaatcaattgaatgagaatagatggcttgagaagactttgaagcgagctgaaaaacgacggagcgagttgtccattatgattcaggtaaaaatactccacaccactaagagtcctgctgtttaagaggctatgcggatggttttc

SEQ ID NO: 14 - protein, 145 aa, Homo sapiens
  REGION 1..145: note = MISC_FEATURE - tr|Q6QJ80|Q6QJ80_HUMAN Activation-induced cytidine deaminase OS=Homo sapiens; OX = 9606 GN=AICDA PE=2 SV=1; AID polypeptide sequence
MDSLLMNRRKFLYQFKNVRWAKGRRETYLCYVVKRRDSATSFSLDFGYLRNKNGCHVELLFLRYISDWDLDPGRCYRVTWFTSWSPCYDCARHVADFLRGNPNLSLRIFTARLYFCEDRKAEPEGLRRLHRAGVQIAIMTFKAPV

SEQ ID NO: 15 - DNA, 10681 bp, Homo sapiens
  misc_feature 1..10681: note = NG_011588.1:5001-15681 Homo sapiens activation induced cytidine deaminase (AICDA), RefSeqGene (LRG_17) on chromosome 12; nucleic acid sequence of the CDS of human AID; polynucleotide sequence
  source 1..10681: mol_type = genomic DNA
agagaaccatcattaattgaagtgagatttttctggcctgagacttgcagggaggcaagaagacactctggacaccactatggacaggtaaagaggcagtcttctcgtgggtgattgcactggccttcctctcagagcaaatctgagtaatgagactggtagctatccctttctctcatgtaactgtctgactgataagatcagcttgatcaatatgcatatatattttttgatctgtctccttttcttctattcagatcttatacgctgtcagcccaattctttctgtttcagacttctcttgatttccctctttttcatgtggcaaaagaagtagtgcgtacaatgtactgattcgtcctgagatttgtaccatggttgaaactaatttatggtaataatattaacatagcaaatctttagagactcaaatcatgaaaaggtaatagcagtactgtactaaaaacggtagtgctaattttcgtaataattttgtaaatattcaacagtaaaacaacttgaagacacactttcctagggaggcgttactgaaataatttagctatagtaagaaaatttgtaattttagaaatgccaagcattctaaattaattgcttgaaagtcactatgattgtgtccattataaggagacaaattcattcaagcaagttatttaatgttaaaggcccaattgttaggcagttaatggcacttttactattaactaatctttccatttgttcagacgtagcttaacttacctcttaggtgtgaatttggttaaggtcctcataatgtctttatgtgcagtttttgataggttattgtcatagaacttattctattcctacatttatgattactatggatgtatgagaataacacctaatccttatactttacctcaatttaactcctttataaagaacttacattacagaataaagattttttaaaaatatatttttttgtagagacagggtcttagcccagccgaggctggtctctaagtcctggcccaagcgatcctcctgcctgggcctcctaaagtgctggaattatagacatgagccatcacatccaatatacagaataaagatttttaatggaggatttaatgttcttcagaaaattttcttgaggtcagacaatgtcaaatgtctcctcagtttacactgagattttgaaaacaagtctgagctataggtccttgtgaagggtccattggaaatacttgttcaaagtaaaatggaaagcaaaggtaaaatcagcagttgaaattcagagaaagacagaaaaggagaaaagatgaaattcaacaggacagaagggaaatatattatcattaaggaggacagtatctgtagagctcattagtgatggcaaaatgacttggtcaggattatttttaacccgcttgtttctggtttgcacggctggggatgcagctagggttctgcctcagggagcacagctgtccagagcagctgtcagcctgcaagcctgaaacactccctcggtaaagtccttcctactcaggacagaaatgacgagaacagggagctggaaacaggcccctaaccagagaagggaagtaatggatcaacaaagttaactagcaggtcaggatcacgcaattcatttcactctgactggtaacatgtgacagaaacagtgtaggcttattgtattttcatgtagagtaggacccaaaaatccacccaaagtcctttatctatgccacatccttcttatctatacttccaggacactttttcttccttatgataaggctctctctctctccacacacacacacacacacacacacacacacacacacacacacacaaacacacaccccgccaaccaaggtgcatgtaaaaagatgtagattcctctgcctttctcatctacacagcccaggagggtaagttaatataagagggatttattggtaagagatgatgcttaatctgtttaacactgggcctcaaagagagaatttcttttcttctgtacttattaagcacctattatgtgttgagcttatatatacaaagggttattatatgctaatatagtaatagtaatggtggttggtactatggtaattaccataaaaattattatccttttaaaataaagctaattattattggatcttttttagtattcattttatgttttttatgtttttgattttttaaaagacaatctcaccctgttacccaggctggagtgcagtggtgcaatcatagctttctgcagtcttgaactcctgggctcaagcaatcctcctgccttggcctcccaaagtgttgggatacagtcatgagccactgcatctggcctaggatccatttagattaaaatatgcattttaaattttaaaataatatggctaatttttaccttatgtaatgtgtatactggcaataaatctagtttgctgcctaaagtttaaagtgctttccagtaagcttcatgtacgtgaggggagacatttaaagtgaaacagacagccaggtgtggtggctcacgcctgtaatcccagcactctgggaggctgaggtgggtggatcgcttgagccctggagttcaagaccagcctgagcaacatggcaaaacgctgtttctataacaaaaattagccgggcatggtggcatgtgcctgtggtcccagctactagggggctgaggcaggagaatcgttggagcccaggaggtcaaggctgcactgagcagtgcttgcgccactgcactccagcctgggtgacaggaccagaccttgcctcaaaaaaataagaagaaaaattaaaaataaatggaaacaactacaaagagctgttgtcctagatgagctacttagttaggctgatattttggtatttaacttttaaagtcagggtctgtcacctgcactacattattaaaatatcaattctcaatgtatatccacacaaagactggtacgtgaatgttcatagtacctttattcacaaaaccccaaagtagagactatccaaatatccatcaacaagtgaacaaataaacaaaatgtgctatatccatgcaatggaataccaccctgcagtacaaagaagctacttggggatgaatcccaaagtcatgacgctaaatgaaagagtcagacatgaaggaggagataatgtatgccatacgaaattctagaaaatgaaagtaacttatagttacagaaagcaaatcagggcaggcatagaggctcacacctgtaatcccagcactttgagaggccacgtgggaagattgctagaactcaggagttcaagaccagcctgggcaacacagtgaaactccattctccacaaaaatgggaaaaaaagaaagcaaatcagtggttgtcctgtggggaggggaaggactgcaaagagggaagaagctctggtggggtgagggtggtgattcaggttctgtatcctgactgtggtagcagtttggggtgtttacatccaaaaatattcgtagaattatgcatcttaaatgggtggagtttactgtatgtaaattatacctcaatgtaagaaaaaataatgtgtaagaaaactttcaattctcttgccagcaaacgttattcaaattcctgagccctttacttcgcaaattctctgcacttctgccccgtaccattaggtgacagcactagctccacaaattggataaatgcatttctggaaaagactagggacaaaatccaggcatcacttgtgctttcatatcaaccatgctgtacagcttgtgttgctgtctgcagctgcaatggggactcttgatttctttaaggaaacttgggttaccagagtatttccacaaatgctattcaaattagtgcttatgatatgcaagacactgtgctaggagccagaaaacaaagaggaggagaaatcagtcattatgtgggaacaacatagcaagatatttagatcattttgactagttaaaaaagcagcagagtacaaaatcacacatgcaatcagtataatccaaatcatgtaaatatgtgcctgtagaaagactagaggaataaacacaagaatcttaacagtcattgtcattagacactaagtctaattattattattagacactatgatatttgagatttaaaaaatctttaatattttaaaatttagagctcttctatttttccatagtattcaagtttgacaatgatcaagtattactctttctttttttttttttttttttttttttgagatggagttttggtcttgttgcccatgctggagtggaatggcatgaccatagctcactgcaacctccacctcctgggttcaagcaaagctgtcgcctcagcctcccgggtagatgggattacaggcgcccaccaccacactcggctaatgtttgtatttttagtagagatggggtttcaccatgttggccaggctggtctcaaactcctgacctcagaggatccacctgcctcagcctcccaaagtgctgggattacagatgtaggccactgcgcccggccaagtattgctcttatacattaaaaaacaggtgtgagccactgcgcccagccaggtattgctcttatacattaaaaaataggccggtgcagtggctcacgcctgtaatcccagcactttgggaagccaaggcgggcagaacacccgaggtcaggagtccaaggccagcctggccaagatggtgaaaccccgtctctattaaaaatacaaacattacctgggcatgatggtgggcgcctgtaatcccagctactcaggaggctgaggcaggaggatccgcggagcctggcagatctgcctgagcctgggaggttgaggctacagtaagccaagatcatgccagtatacttcagcctgggcgacaaagtgagaccgtaacaaaaaaaaaaaaatttaaaaaaagaaatttagatcaagatccaactgtaaaaagtggcctaaacaccacattaaagagtttggagtttattctgcaggcagaagagaaccatcagggggtcttcagcatgggaatggcatggtgcacctggtttttgtgagatcatggtggtgacagtgtggggaatgttattttggagggactggaggcagacagaccggttaaaaggccagcacaacagataaggaggaagaagatgagggcttggaccgaagcagagaagagcaaacagggaaggtacaaattcaagaaatattggggggtttgaatcaacacatttagatgattaattaaatatgaggactgaggaataagaaatgagtcaaggatggttccaggctgctaggctgcttacctgaggtggcaaagtcgggaggagtggcagtttaggacagggggcagttgaggaatattgttttgatcattttgagtttgaggtacaagttggacacttaggtaaagactggaggggaaatctgaatatacaattatgggactgaggaacaagtttattttattttttgtttcgttttcttgttgaagaacaaatttaattgtaatcccaagtcatcagcatctagaagacagtggcaggaggtgactgtcttgtgggtaagggtttggggtccttgatgagtatctctcaattggccttaaatataagcaggaaaaggagtttatgatggattccaggctcagcagggctcaggagggctcaggcagccagcagaggaagtcagagcatcttctttggtttagcccaagtaatgacttccttaaaaagctgaaggaaaatccagagtgaccagattataaactgtactcttgcattttctctccctcctctcacccacagcctcttgatgaaccggaggaagtttctttaccaattcaaaaatgtccgctgggctaagggtcggcgtgagacctacctgtgctacgtagtgaagaggcgtgacagtgctacatccttttcactggactttggttatcttcgcaataaggtatcaattaaagtcggctttgcaagcagtttaatggtcaactgtgagtgcttttagagccacctgctgatggtattacttccatccttttttggcatttgtgtctctatcacattcctcaaatccttttttttatttctttttccatgtccatgcacccatattagacatggcccaaaatatgtgatttaattcctccccagtaatgctgggcaccctaataccactccttccttcagtgccaagaacaactgctcccaaactgtttaccagctttcctcagcatctgaattgcctttgagattaattaagctaaaagcatttttatatgggagaatattatcagcttgtccaagcaaaaattttaaatgtgaaaaacaaattgtgtcttaagcatttttgaaaattaaggaagaagaatttgggaaaaaattaacggtggctcaattctgtcttccaaatgatttcttttccctcctactcacatgggtcgtaggccagtgaatacattcaacatggtgatccccagaaaactcagagaagcctcggctgatgattaattaaattgatctttcggctacccgagagaattacatttccaagagacttcttcaccaaaatccagatgggtttacataaacttctgcccacgggtatctcctctctcctaacacgctgtgacgtctgggcttggtggaatctcagggaagcatccgtggggtggaaggtcatcgtctggctcgttgtttgatggttatattaccatgcaattttctttgcctacatttgtattgaatacatcccaatctccttcctattcggtgacatgacacattctatttcagaaggctttgattttatcaagcactttcatttacttctcatggcagtgcctattacttctcttacaatacccatctgtctgctttaccaaaatctatttccccttttcagatcctcccaaatggtcctcataaactgtcctgcctccacctagtggtccaggtatatttccacaatgttacatcaacaggcacttctagccattttccttctcaaaaggtgcaaaaagcaacttcataaacacaaattaaatcttcggtgaggtagtgtgatgctgcttcctcccaactcagcgcacttcgtcttcctcattccacaaaaacccatagccttccttcactctgcaggactagtgctgccaagggttcagctctacctactggtgtgctcttttgagcaagttgcttagcctctctgtaacacaaggacaatagctgcaagcatccccaaagatcattgcaggagacaatgactaaggctaccagagccgcaataaaagtcagtgaattttagcgtggtcctctctgtctctccagaacggctgccacgtggaattgctcttcctccgctacatctcggactgggacctagaccctggccgctgctaccgcgtcacctggttcacctcctggagcccctgctacgactgtgcccgacatgtggccgactttctgcgagggaaccccaacctcagtctgaggatcttcaccgcgcgcctctacttctgtgaggaccgcaaggctgagcccgaggggctgcggcggctgcaccgcgccggggtgcaaatagccatcatgaccttcaaaggtgcgaaagggccttccgcgcaggcgcagtgcagcagcccgcattcgggattgcgatgcggaatgaatgagttagtggggaagctcgaggggaagaagtgggcggggattctggttcacctctggagccgaaattaaagattagaagcagagaaaagagtgaatggctcagagacaaggccccgaggaaatgagaaaatggggccagggttgcttctttcccctcgatttggaacctgaactgtcttctacccccatatccccgcctttttttcctttttttttttttgaagattatttttactgctggaatacttttgtagaaaaccacgaaagaactttcaaagcctgggaagggctgcatgaaaattcagttcgtctctccagacagcttcggcgcatccttttggtaaggggcttcctcgctttttaaattttctttctttctctacagtcttttttggagtttcgtatatttcttatattttcttattgttcaatcactctcagttttcatctgatgaaaactttatttctcctccacatcagctttttcttctgctgtttcaccattcagagccctctgctaaggttccttttccctcccttttctttcttttgttgtttcacatctttaaatttctgtctctccccagggttgcgtttccttcctggtcagaattcttttctcctttttttttttttttttttttttttttaaacaaacaaacaaaaaacccaaaaaaactctttcccaatttactttcttccaacatgttacaaagccatccactcagtttagaagactctccggccccaccgacccccaacctcgttttgaagccattcactcaatttgcttctctctttctctacagcccctgtatgaggttgatgacttacgagacgcatttcgtactttgggactttgatagcaacttccaggaatgtcacacacgatgaaatatctctgctgaagacagtggataaaaaacagtccttcaagtcttctctgtttttattcttcaactctcactttcttagagtttacagaaaaaatatttatatacgactctttaaaaagatctatgtcttgaaaatagagaaggaacacaggtctggccagggacgtgctgcaattggtgcagttttgaatgcaacattgtcccctactgggaataacagaactgcaggacctgggagcatcctaaagtgtcaacgtttttctatgacttttaggtaggatgagagcagaaggtagatcctaaaaagcatggtgagaggatcaaatgtttttatatcaacatcctttattatttgattcatttgagttaacagtggtgttagtgatagatttttctattcttttcccttgacgtttactttcaagtaacacaaactcttccatcaggccatgatctataggacctcctaatgagagtatctgggtgattgtgaccccaaaccatctctccaaagcattaatatccaatcatgcgctgtatgttttaatcagcagaagcatgtttttatgtttgtacaaaagaagattgttatgggtggggatggaggtatagaccatgcatggtcaccttcaagctactttaataaaggatcttaaaatgggcaggaggactgtgaacaagacaccctaataatgggttgatgtctgaagtagcaaatcttctggaaacgcaaactcttttaaggaagtccctaatttagaaacacccacaaacttcacatatcataattagcaaacaattggaaggaagttgcttgaatgttggggagaggaaaatctattggctctcgtgggtctcttcatctcagaaatgccaatcaggtcaaggtttgctacattttgtatgtgtgtgatgcttctcccaaaggtatattaactatataagagagttgtgacaaaacagaatgataaagctgcgaaccgtggcacacgctcatagttctagctgcttgggaggttgaggagggaggatggcttgaacacaggtgttcaaggccagcctgggcaacataacaagatcctgtctctcaaaaaaaaaaaaaaaaaaaagaaagagagagggccgggcgtggtggctcacgcctgtaatcccagcactttgggaggccgagccgggcggatcacctgtggtcaggagtttgagaccagcctggccaacatggcaaaaccccgtctgtactcaaaatgcaaaaattagccaggcgtggtagcaggcacctgtaatcccagctacttgggaggctgaggcaggagaatcgcttgaacccaggaggtggaggttgcagtaagctgagatcgtgccgttgcactccagcctgggcgacaagagcaagactctgtctcagaaaaaaaaaaaaaaaagagagagagagagaaagagaacaatatttgggagagaaggatggggaagcattgcaaggaaattgtgctttatccaacaaaatgtaaggagccaataagggatccctatttgtctcttttggtgtctatttgtccctaacaactgtctttgacagtgagaaaaatattcagaataaccatatccctgtgccgttattacctagcaacccttgcaatgaagatgagcagatccacaggaaaacttgaatgcacaactgtcttattttaatcttattgtacataagtttgtaaaagagttaaaaattgttacttcatgtattcatttatattttatattattttgcgtctaatgattttttattaacatgatttccttttctgatatattgaaatggagtctcaaagcttcataaatttataactttagaaatgattctaataacaacgtatgtaattgtaacattgcagtaatggtgctacgaagccatttctcttgatttttagtaaacttttatgacagcaaatttgcttctggctcactttcaatcagttaaataaatgataaataattttggaagctgtgaagataaaataccaaataaaataatataaaagtgatttatatgaagttaaaataaaaaatcagtatgatggaataaacttg

SEQ ID NO: 16 - protein, 198 aa, Homo sapiens [sequence omitted]

SEQ ID NO: 17 - protein, 198 aa, Canis lupus
  REGION 1..198: note = MISC_FEATURE - Canine AID (clAID) polypeptide sequence
  REGION 1..30: note = MISC_FEATURE - Nuclear localization sequence
  REGION 183..198: note = MISC_FEATURE - Nuclear export signal
MDSLLMKQRKFLYHFKNVRWAKGRHETYLCYVVKRRDSATSFSLDFGHLRNKSGCHVELLFLRYISDWDLDPGRCYRVTWFTSWSPCYDCARHVADFLRGYPNLSLRIFAARLYFCEDRKAEPEGLRRLHRAGVQIAIMTFKDYFYCWNTFVENREKTFKAWEGLHENSVRLSRQLRRILLPLYEVDDLRDAFRTLGL

SEQ ID NO: 18 - protein, 199 aa, Bos taurus
  REGION 1..199: note = MISC_FEATURE - Bovine AID (btAID) polypeptide sequence
  REGION 1..30: note = MISC_FEATURE - Nuclear localization sequence
  REGION 183..199: note = MISC_FEATURE - Nuclear export signal
MDSLLKKQRQFLYQFKNVRWAKGRHETYLCYVVKRRDSPTSFSLDFGHLRNKAGCHVELLFLRYISDWDLDPGRCYRVTWFTSWSPCYDCARHVADFLRGYPNLSLRIFTARLYFCDKERKAEPEGLRRLHRAGVQIAIMTFKDYFYCWNTFVENHERTFKAWEGLHENSVRLSRQLRRILLPLYEVDDLRDAFRTLGL

SEQ ID NO: 19 - protein, 239 aa, Rattus sp.
  REGION 1..239: note = MISC_FEATURE - Rat AID polypeptide sequence
  REGION 1..26: note = MISC_FEATURE - Nuclear localization sequence
  REGION 194..239: note = MISC_FEATURE - Nuclear export signal
MAVGSKPKAALVGPHWERERIWCFLCSTGLGTQQTGQTSRWLRPAATQDPVSPPRSLLMKQRKFLYHFKNVRWAKGRHETYLCYVVKRRDSATSFSLDFGYLRNKSGCHVELLFLRYISDWDLDPGRCYRVTWFTSWSPCYDCARHVADFLRGNPNLSLRIFTARLTGWGALPAGLMSPARPSDYFYCWNTFVENHERTFKAWEGLHENSVRLSRRLRRILLPLYEVDDLRDAFRTLGL

SEQ ID NO: 20 - protein, 198 aa, Mus musculus [sequence omitted]

SEQ ID NO: 21 - protein, 229 aa, Rattus norvegicus [sequence omitted]

SEQ ID NO: 22 - protein, 229 aa, Mesocricetus auratus
  REGION 1..229: note = MISC_FEATURE - maAPOBEC-1 polypeptide sequence
MSSETGPVVVDPTLRRRIEPHEFDAFFDQGELRKETCLLYEIRWGGRHNIWRHTGQNTSRHVEINFIEKFTSERYFYPSTRCSIVWFLSWSPCGECSKAITEFLSGHPNVTLFIYAARLYHHTDQRNRQGLRDLISRGVTIRIMTEQEYCYCWRNFVNYPPSNEVYWPRYPNLWMRLYALELYCIHLGLPPCLKIKRRHQYPLTFFRLNLQSCHYQRIPPHILWATGFI

SEQ ID NO: 23 - protein, 236 aa, Pongo pygmaeus
  REGION 1..236: note = MISC_FEATURE - ppAPOBEC-1 polypeptide sequence
MTSEKGPSTGDPTLRRRIESWEFDVFYDPRELRKETCLLYEIKWGMSRKIWRSSGKNTTNHVEVNFIKKFTSERRFHSSISCSITWFLSWSPCWECSQAIREFLSQHPGVTLVIYVARLFWHMDQRNRQGLRDLVNSGVTIQIMRASEYYHCWRNFVNYPPGDEAHWPQYPPLWMMLYALELHCIILSLPPCLKISRRWQNHLAFFRLHLQNCHYQTIPPHILLATGLIHPSVTWR

SEQ ID NO: 24 - protein, 236 aa, Oryctolagus cuniculus
  REGION 1..236: note = MISC_FEATURE - ocAPOBEC1 polypeptide sequence
MASEKGPSNKDYTLRRRIEPWEFEVFFDPQELRKEACLLYEIKWGASSKTWRSSGKNTTNHVEVNFLEKLTSEGRLGPSTCCSITWFLSWSPCWECSMAIREFLSQHPGVTLIIFVARLFQHMDRRNRQGLKDLVTSGVTVRVMSVSEYCYCWENFVNYPPGKAAQWPRYPPRWMLMYALELYCIILGLPPCLKISRRHQKQLTFFSLTPQYCHYKMIPPYILLATGLLQPSVPWR

SEQ ID NO: 25 - protein, 235 aa, Monodelphis domestica
  REGION 1..235: note = MISC_FEATURE - mdAPOBEC-1 polypeptide sequence
MNSKTGPSVGDATLRRRIKPWEFVAFFNPQELRKETCLLYEIKWGNQNIWRHSNQNTSQHAEINFMEKFTAERHFNSSVRCSITWFLSWSPCWECSKAIRKFLDHYPNVTLAIFISRLYWHMDQQHRQGLKELVHSGVTIQIMSYSEYHYCWRNFVDYPQGEEDYWPKYPYLWIMLYVLELHCIILGLPPCLKISGSHSNQLALFSLDLQDCHYQKIPYNVLVATGLVQPFVTWR

SEQ ID NO: 26 - protein, 224 aa, Pongo pygmaeus
  REGION 1..224: note = MISC_FEATURE - ppAPOBEC-2 polypeptide sequence
MAQKEEAAAATEAASQNGEDLENLDDPEKLKELIELPPFEIVTGERLPANFFKFQFRNVEYSSGRNKTFLCYVVEAQGKGGQVQASRGYLEDEHAAAHAEEAFFNTILPAFDPALRYNVTWYVSSSPCAACADRIIKTLSKTKNLRLLILVGRLFMWEELEIQDALKKLKEAGCKLRIMKPQDFEYVWQNFVEQEEGESKAFQPWEDIQENFLYYEEKLADILK

SEQ ID NO: 27 - protein, 224 aa, Bos taurus
  REGION 1..224: note = MISC_FEATURE - btAPOBEC-2 polypeptide sequence
MAQKEEAAAAAEPASQNGEEVENLEDPEKLKELIELPPFEIVTGERLPAHYFKFQFRNVEYSSGRNKTFLCYVVEAQSKGGQVQASRGYLEDEHATNHAEEAFFNSIMPTFDPALRYMVTWYVSSSPCAACADRIVKTLNKTKNLRLLILVGRLFMWEEPEIQAALRKLKEAGCRLRIMKPQDFEYIWQNFVEQEEGESKAFEPWEDIQENFLYYEEKLADILK

SEQ ID NO: 28 - protein, 440 aa, Mus musculus
  REGION 1..440: note = MISC_FEATURE - mAPOBEC-3-(1) polypeptide sequence
MQPQRLGPRAGMGPFCLGCSHRKCYSPIRNLISQETFKFHFKNLGYAKGRKDTFLCYEVTRKDCDSPVSLHHGVFKNKDNIHAEICFLYWFHDKVLKVLSPREEFKITWYMSWSPCFECAEQIVRFLATHHNLSLDIFSSRLYNVQDPETQQNLCRLVQEGAQVAAMDLYEFKKCWKKFVDNGGRRFRPWKRLLTNFRYQDSKLQEILRPCYISVPSSSSSTLSNICLTKGLPETRFWVEGRRMDPLSEEEFYSQFYNQRVKHLCYYHRMKPYLCYQLEQFNGQAPLKGCLLSEKGKQHAEILFLDKIRSMELSQVTITCYLTWSPCPNCAWQLAAFKRDRPDLILHIYTSRLYFHWKRPFQKGLCSLWQSGILVDVMDLPQFTDCWTNFVNPKRPFWPWKGLEIISRRTQRRLRRIKESWGLQDLVNDFGNLQLGPPMS

SEQ ID NO: 29 - protein, 429 aa, Mus musculus
  REGION 1..429: note = MISC_FEATURE - APOBEC-3-(2) (Mouse APOBEC-3) polypeptide sequence
  REGION 71..108: note = MISC_FEATURE - Nucleic acid editing domain
  REGION 288..319: note = MISC_FEATURE - Nucleic acid editing domain
MGPFCLGCSHRKCYSPIRNLISQETFKFHFKNLGYAKGRKDTFLCYEVTRKDCDSPVSLHHGVFKNKDNIHAEICFLYWFHDKVLKVLSPREEFKITWYMSWSPCFECAEQIVRFLATHHNLSLDIFSSRLYNVQDPETQQNLCRLVQEGAQVAAMDLYEFKKCWKKFVDNGGRRFRPWKRLLTNFRYQDSKLQEILRPCYIPVPSSSSSTLSNICLTKGLPETRFCVEGRRMDPLSEEEFYSQFYNQRVKHLCYYHRMKPYLCYQLEQFNGQAPLKGCLLSEKGKQHAEILFLDKIRSMELSQVTITCYLTWSPCPNCAWQLAAFKRDRPDLILHIYTSRLYFHWKRPFQKGLCSLWQSGILVDVMDLPQFTDCWTNFVNPKRPFWPWKGLEIISRRTQRRLRRIKESWGLQDLVNDFGNLQLGPPMS

SEQ ID NO: 30 - protein, 430 aa, Rattus sp.
  REGION 1..430: note = MISC_FEATURE - APOBEC-3 polypeptide sequence
  REGION 72..109: note = MISC_FEATURE - Nucleic acid editing domain
  REGION 289..320: note = MISC_FEATURE - Nucleic acid editing domain
MGPFCLGCSHRKCYSPIRNLISQETFKFHFKNRLRYAIDRKDTFLCYEVTRKDCDSPVSLHHGVFKNKDNIHAEICFLYWFHDKVLKVLSPREEFKITWYMSWSPCFECAEQVLRFLATHHNLSLDIFSSRLYNIRDPENQQNLCRLVQEGAQVAAMDLYEFKKCWKKFVDNGGRRFRPWKKLLTNFRYQDSKLQEILRPCYIPVPSSSSSTLSNICLTKGLPETRFCVERRRVHLLSEEEFYSQFYNQRVKHLCYYHGVKPYLCYQLEQFNGQAPLKGCLLSEKGKQHAEILFLDKIRSMELSQVIITCYLTWSPCPNCAWQLAAFKRDRPDLILHIYTSRLYFHWKRPFQKGLCSLWQSGILVDVMDLPQFTDCWTNFVNPKRPFWPWKGLEIISRRTQRRLHRIKESWGLQDLVNDFGNLQLGPPMS

SEQ ID NO: 31 - protein, 199 aa, Homo sapiens
  REGION 1..199: note = MISC_FEATURE - hAPOBEC-3A polypeptide sequence
  REGION 70..106: note = MISC_FEATURE - Nucleic acid editing domain
MEASPASGPRHLMDPHIFTSNFNNGIGRHKTYLCYEVERLDNGTSVKMDQHRGFLHNQAKNLLCGFYGRHAELRFLDLVPSLQLDPAQIYRVTWFISWSPCFSWGCAGEVRAFLQENTHVRLRIFAARIYDYDPLYKEALQMLRDAGAQVSIMTYDEFKHCWDTFVDHQGCPFQPWDGLDEHSQALSGRLRAILQNQGN

SEQ ID NO: 32 - protein, 373 aa, Homo sapiens
  REGION 1..373: note = MISC_FEATURE - hAPOBEC-3F polypeptide sequence
  REGION 65..99: note = MISC_FEATURE - Nucleic acid editing domain
  REGION 248..283: note = MISC_FEATURE - Nucleic acid editing domain
MKPHFRNTVERMYRDTFSYNFYNRPILSRRNTVWLCYEVKTKGPSRPRLDAKIFRGQVYSQPEHHAEMCFLSWFCGNQLPAYKCFQITWFVSWTPCPDCVAKLAEFLAEHPNVTLTISAARLYYYWERDYRRALCRLSQAGARVKIMDDEEFAYCWENFVYSEGQPFMPWYKFDDNYAFLHRTLKEILRNPMEAMYPHIFYFHFKNLRKAYGRNESWLCFTMEVVKHHSPVSWKRGVFRNQVDPETHCHAERCFLSWFCDDILSPNTNYEVTWYTSWSPCPECAGEVAEFLARHSNVNLTIFTARLYYFWDTDYQEGLRSLSQEGASVEIMGYKDFKYCWENFVYNDDEPFKPWKGLKYNFLFLDSKLQEILE

SEQ ID NO: 33 - protein, 370 aa, Macaca mulatta
  REGION 1..370: note = MISC_FEATURE - Rhesus macaque APOBEC-3G polypeptide sequence
  REGION 1..61: note = MISC_FEATURE - Cytoplasmic localization signal
MVEPMDPRTFVSNFNNRPILSGLNTVWLCCEVKTKDPSGPPLDAKIFQGKVYSKAKYHPEMRFLRWFHKWRQLHHDQEYKVTWYVSWSPCTRCANSVATFLAKDPKVTLTIFVARLYYFWKPDYQQALRILCQKRGGPHATMKIMNYNEFQDCWNKFVDGRGKPFKPRNNLPKHYTLLQATLGELLRHLMDPGTFTSNFNNKPWVSGQHETYLCYKVERLHNDTWVPLNQHRGFLRNQAPNIHGFPKGRHAELCFLDLIPFWKLDGQQYRVTCFTSWSPCFSCAQEMAKFISNNEHVSLCIFAARIYDDQGRYQEGLRALHRDGAKIAMMNYSEFEYCWDTFVDRQGRPFQPWDGLDEHSQALSGRLRAI

SEQ ID NO: 34 - protein, 384 aa, Pan troglodytes
  REGION 1..384: note = MISC_FEATURE - Chimpanzee APOBEC-3G polypeptide sequence
  REGION 1..60: note = MISC_FEATURE - Cytoplasmic localization signal
  REGION 65..100: note = MISC_FEATURE - Nucleic acid editing domain
  REGION 257..291: note = MISC_FEATURE - Nucleic acid editing domain
MKPHFRNPVERMYQDTFSDNFYNRPILSHRNTVWLCYEVKTKGPSRPPLDAKIFRGQVYSKLKYHPEMRFFHWFSKWRKLHRDQEYEVTWYISWSPCTKCTRDVATFLAEDPKVTLTIFVARLYYFWDPDYQEALRSLCQKRDGPRATMKIMNYDEFQHCWSKFVYSQRELFEPWNNLPKYYILLHIMLGEILRHSMDPPTFTSNFNNELWVRGRHETYLCYEVERLHNDTWVLLNQRRGFLCNQAPHKHGFLEGRHAELCFLDVIPFWKLDLHQDYRVTCFTSWSPCFSCAQEMAKFISNNKHVSLCIFAARIYDDQGRCQEGLRTLAKAGAKISIMTYSEFKHCWDTFVDHQGCPFQPWDGLEEHSQALSGRLRAILQNQGN

SEQ ID NO: 35 - protein, 377 aa, Chlorocebus sabaeus
  REGION 1..377: note = MISC_FEATURE - Green monkey APOBEC-3G polypeptide sequence
  REGION 1..60: note = MISC_FEATURE - Cytoplasmic localization signal
  REGION 65..100: note = MISC_FEATURE - Nucleic acid editing domain
  REGION 257..290: note = MISC_FEATURE - Nucleic acid editing domain
MNPQIRNMVEQMEPDIFVYYFNNRPILSGRNTVWLCYEVKTKDPSGPPLDANIFQGKLYPEAKDHPEMKFLHWFRKWRQLHRDQEYEVTWYVSWSPCTRCANSVATFLAEDPKVTLTIFVARLYYFWKPDYQQALRILCQERGGPHATMKIMNYNEFQHCWNEFVDGQGKPFKPRKNLPKHYTLLHATLGELLRHVMDPGTFTSNFNNKPWVSGQRETYLCYKVERSHNDTWVLLNQHRGFLRNQAPDRHGFPKGRHAELCFLDLIPFWKLDDQQYRVTCFTSWSPCFSCAQKMAKFISNNKHVSLCIFAARIYDDQGRCQEGLRTLHRDGAKIAVMNYSEFEYCWDTFVDRQGRPFQPWDGLDEHSQALSGRLRAI

SEQ ID NO: 36 - protein, 384 aa, Homo sapiens
  REGION 1..384: note = MISC_FEATURE - Human APOBEC-3G polypeptide sequence
  REGION 1..60: note = MISC_FEATURE - Cytoplasmic localization signal
  REGION 65..100: note = MISC_FEATURE - Nucleic acid editing domain
  REGION 257..291: note = MISC_FEATURE - Nucleic acid editing domain
MKPHFRNTVERMYRDTFSYNFYNRPILSRRNTVWLCYEVKTKGPSRPPLDAKIFRGQVYSELKYHPEMRFFHWFSKWRKLHRDQEYEVTWYISWSPCTKCTRDMATFLAEDPKVTLTIFVARLYYFWDPDYQEALRSLCQKRDGPRATMKIMNYDEFQHCWSKFVYSQRELFEPWNNLPKYYILLHIMLGEILRHSMDPPTFTFNFNNEPWVRGRHETYLCYEVERMHNDTWVLLNQRRGFLCNQAPHKHGFLEGRHAELCFLDVIPFWKLDLDQDYRVTCFTSWSPCFSCAQEMAKFISKNKHVSLCIFTARIYDDQGRCQEGLRTLAEAGAKISIMTYSEFKHCWDTFVDHQGCPFQPWDGLDEHSQDLSGRLRAILQNQEN

SEQ ID NO: 37 - protein, 382 aa, Homo sapiens
  REGION 1..382: note = MISC_FEATURE - Human APOBEC-3B polypeptide sequence
  REGION 66..100: note = MISC_FEATURE - Nucleic acid editing domain
  REGION 251..289: note = MISC_FEATURE - Nucleic acid editing domain
MNPQIRNPMERMYRDTFYDNFENEPILYGRSYTWLCYEVKIKRGRSNLLWDTGVFRGQVYFKPQYHAEMCFLSWFCGNQLPAYKCFQITWFVSWTPCPDCVAKLAEFLSEHPNVTLTISAARLYYYWERDYRRALCRLSQAGARVTIMDYEEFAYCWENFVYNEGQQFMPWYKFDENYAFLHRTLKEILRYLMDPDTFTFNFNNDPLVLRRRQTYLCYEVERLDNGTWVLMDQHMGFLCNEAKNLLCGFYGRHAELRFLDLVPSLQLDPAQIYRVTWFISWSPCFSWGCAGEVRAFLQENTHVRLRIFAARIYDYDPLYKEALQMLRDAGAQVSIMTYDEFEYCWDTFVYRQGCPFQPWDGLEEHSQALSGRLRAILQNQGN

SEQ ID NO: 38 - protein, 395 aa, Rattus sp.
  REGION 1..395: note = MISC_FEATURE - Rat APOBEC-3B polypeptide sequence
MQPQGLGPNAGMGPVCLGCSHRRPYSPIRNPLKKLYQQTFYFHFKNVRYAWGRKNNFLCYEVNGMDCALPVPLRQGVFRKQGHIHAELCFIYWFHDKVLRVLSPMEEFKVTWYMSWSPCSKCAEQVARFLAAHRNLSLAIFSSRLYYYLRNPNYQQKLCRLIQEGVHVAAMDLPEFKKCWNKFVDNDGQPFRPWMRLRINFSFYDCKLQEIFSRMNLLREDVFYLQFNNSHRVKPVQNRYYRRKSYLCYQLERANGQEPLKGYLLYKKGEQHVEILFLEKMRSMELSQVRITCYLTWSPCPNCARQLAAFKKDHPDLILRIYTSRLYFWRKKFQKGLCTLWRSGIHVDVMDLPQFADCWTNFVNPQRPFRPWNELEKNSWRIQRRLRRIKESWGL

SEQ ID NO: 39 - protein, 226 aa, Bos taurus
  REGION 1..226: note = MISC_FEATURE - Bovine APOBEC-3B polypeptide sequence
DGWEVAFRSGTVLKAGVLGVSMTEGWAGSGHPGQGACVWTPGTRNTMNLLREVLFKQQFGNQPRVPAPYYRRKTYLCYQLKQRNDLTLDRGCFRNKKQRHAERFIDKINSLDLNPSQSYKIICYITWSPCPNCANELVNFITRNNHLKLEIFASRLYFHWIKSFKMGLQDLQNAGISVAVMTHTEFEDCWEQFVDNQSRPFQPWDKLEQYSASIRRRLQRILTAPI

SEQ ID NO: 40 - protein, 490 aa, Pan troglodytes
  REGION 1..490: note = MISC_FEATURE - Chimpanzee APOBEC-3B polypeptide sequence
MNPQIRNPMEWMYQRTFYYNFENEPILYGRSYTWLCYEVKIRRGHSNLLWDTGVFRGQMYSQPEHHAEMCFLSWFCGNQLSAYKCFQITWFVSWTPCPDCVAKLAKFLAEHPNVTLTISAARLYYYWERDYRRALCRLSQAGARVKIMDDEEFAYCWENFVYNEGQPFMPWYKFDDNYAFLHRTLKEIIRHLMDPDTFTFNFNNDPLVLRRHQTYLCYEVERLDNGTWVLMDQHMGFLCNEAKNLLCGFYGRHAELRFLDLVPSLQLDPAQIYRVTWFISWSPCFSWGCAGQVRAFLQENTHVRLRIFAARIYDYDPLYKEALQMLRDAGAQVSIMTYDEFEYCWDTFVYRQGCPFQPWDGLEEHSQALSGRLRAILQVRASSLCMVPHRPPPPPQSPGPCLPLCSEPPLGSLLPTGRPAPSLPFLLTASFSFPPPASLPPLPSLSLSPGHLPVPSFHSLTSCSIQPPCSSRIRETEGWASVSKEGRDLG

SEQ ID NO: 41 - protein, 190 aa, Homo sapiens
  REGION 1..190: note = MISC_FEATURE - Human APOBEC-3C polypeptide sequence
  REGION 65..100: note = MISC_FEATURE - Nucleic acid editing domain
MNPQIRNPMKAMYPGTFYFQFKNLWEANDRNETWLCFTVEGIKRRSVVSWKTGVFRNQVDSETHCHAERCFLSWFCDDILSPNTKYQVTWYTSWSPCPDCAGEVAEFLARHSNVNLTIFTARLYYFQYPCYQEGLRSLSQEGVAVEIMDYEDFKYCWENFVYNDNEPFKPWKGLKTNFRLLKRRLRESLQ

SEQ ID NO: 42 - protein, 190 aa, Gorilla sp.
  REGION 1..190: note = MISC_FEATURE - Gorilla APOBEC-3C polypeptide sequence
  REGION 65..100: note = MISC_FEATURE - Nucleic acid editing domain
MNPQIRNPMKAMYPGTFYFQFKNLWEANDRNETWLCFTVEGIKRRSVVSWKTGVFRNQVDSETHCHAERCFLSWECDDILSPNTNYQVTWYTSWSPCPECAGEVAEFLARHSNVNLTIFTARLYYFQDTDYQEGLRSLSQEGVAVKIMDYKDFKYCWENFVYNDDEPFKPWKGLKYNFRFLKRRLQEILE

SEQ ID NO: 43 - protein, 202 aa, Macaca mulatta
  REGION 1..202: note = MISC_FEATURE - Rhesus macaque APOBEC-3A polypeptide sequence
  REGION 72..103: note = MISC_FEATURE - Nucleic acid editing domain
MDGSPASRPRHLMDPNTFTFNFNNDLSVRGRHQTYLCYEVERLDNGTWVPMDERRGFLCNKAKNVPCGDYGCHVELRFLCEVPSWQLDPAQTYRVTWFISWSPCFRRGCAGQVRVFLQENKHVRLRIFAARIYDYDPLYQEALRTLRDAGAQVSIMTYEEFKHCWDTFVDRQGRPFQPWDGLDEHSQALSGRLRAILQNQGN

SEQ ID NO: 44 - protein, 185 aa, Bos taurus
  REGION 1..185: note = MISC_FEATURE - Bovine APOBEC-3A polypeptide sequence
  REGION 56..86: note = MISC_FEATURE - Nucleic acid editing domain
MDEYTFTENFNNQGWPSKTYLCYEMERLDGDATIPLDEYKGFVRNKGLDQPEKPCHAELYFLGKIHSWNLDRNQHYRLTCFISWSPCYDCAQKLTTFLKENHHISLHILASRIYTHNRFGCHQSGLCELQAAGARITIMTFEDFKHCWETFVDHKGKPFQPWEGLNVKSQALCTELQAILKTQQN

SEQ ID NO: 45 - protein, 200 aa, Homo sapiens
  REGION 1..200: note = MISC_FEATURE - Human APOBEC-3H polypeptide sequence
  REGION 54..88: note = MISC_FEATURE - Nucleic acid editing domain
MALLTAETFRLQFNNKRRLRRPYYPRKALLCYQLTPQNGSTPTRGYFENKKKCHAEICFINEIKSMGLDETQCYQVTCYLTWSPCSSCAWELVDFIKAHDHLNLGIFASRLYYHWCKPQQKGLRLLCGSQVPVEVMGFPKFADCWENFVDHEKPLSFNPYKMLEELDKNSRAIKRRLERIKIPGVRAQGRYMDILCDAEV

SEQ ID NO: 46 - protein, 210 aa, Macaca mulatta
  REGION 1..210: note = MISC_FEATURE - Rhesus macaque APOBEC-3H polypeptide sequence
MALLTAKTFSLQFNNKRRVNKPYYPRKALLCYQLTPQNGSTPTRGHLKNKKKDHAEIRFINKIKSMGLDETQCYQVTCYLTWSPCPSCAGELVDFIKAHRHLNLRIFASRLYYHWRPNYQEGLLLLCGSQVPVEVMGLPEFTDCWENFVDHKEPPSFNPSEKLEELDKNSQAIKRRLERIKSRSVDVLENGLRSLQLGPVTPSSSIRNSR

SEQ ID NO: 47 - protein, 386 aa, Homo sapiens
  REGION 1..386: note = MISC_FEATURE - Human APOBEC-3D polypeptide sequence
  REGION 78..109: note = MISC_FEATURE - Nucleic acid editing domain
  REGION 262..296: note = MISC_FEATURE - Nucleic acid editing domain
MNPQIRNPMERMYRDTFYDNFENEPILYGRSYTWLCYEVKIKRGRSNLLWDTGVFRGPVLPKRQSNHRQEVYFRFENHAEMCFLSWFCGNRLPANRRFQITWFVSWNPCLPCVVKVTKFLAEHPNVTLTISAARLYYYRDRDWRWVLLRLHKAGARVKIMDYEDFAYCWENFVCNEGQPFMPWYKFDDNYASLHRTLKEILRNPMEAMYPHIFYFHFKNLLKACGRNESWLCFTMEVTKHHSAVFRKRGVFRNQVDPETHCHAERCFLSWFCDDILSPNTNYEVTWYTSWSPCPECAGEVAEFLARHSNVNLTIFTARLCYFWDTDYQEGLCSLSQEGASVKIMGYKDFVSCWKNFVYSDDEPFKPWKGLQTNFRLLKRRLREILQ

SEQ ID NO: 48 - protein, 236 aa, Homo sapiens
  REGION 1..236: note = MISC_FEATURE - Human APOBEC-1 polypeptide sequence
MTSEKGPSTGDPTLRRRIEPWEFDVFYDPRELRKEACLLYEIKWGMSRKIWRSSGKNTTNHVEVNFIKKFTSERDFHPSMSCSITWFLSWSPCWECSQAIREFLSRHPGVTLVIYVARLFWHMDQQNRQGLRDLVNSGVTIQIMRASEYYHCWRNFVNYPPGDEAHWPQYPPLWMMLYALELHCIILSLPPCLKISRRWQNHLTFFRLHLQNCHYQTIPPHILLATGLIHPSVAWR

SEQ ID NO: 49 - protein, 229 aa, Mus musculus
  REGION 1..229: note = MISC_FEATURE - Mouse APOBEC-1 polypeptide sequence
MSSETGPVAVDPTLRRRIEPHEFEVFFDPRELRKETCLLYEINWGGRHSVWRHTSQNTSNHVEVNFLEKFTTERYFRPNTRCSITWFLSWSPCGECSRAITEFLSRHPYVTLFIYIARLYHHTDQRNRQGLRDLISSGVTIQIMTEQEYCYCWRNFVNYPPSNEAYWPRYPHLWVKLYVLELYCIILGLPPCLKILRRKQPQLTFFTITLQTCHYQRIPPHLLWATGLK

SEQ ID NO: 50 - protein, 224 aa, Homo sapiens
  REGION 1..224: note = MISC_FEATURE - Human APOBEC-2 polypeptide sequence
MAQKEEAAVATEAASQNGEDLENLDDPEKLKELIELPPFEIVTGERLPANFFKFQFRNVEYSSGRNKTFLCYVVEAQGKGGQVQASRGYLEDEHAAAHAEEAFFNTILPAFDPALRYNVTWYVSSSPCAACADRIIKTLSKTKNLRLLILVGRLFMWEEPEIQAALKKLKEAGCKLRIMKPQDFEYVWQNFVEQEEGESKAFQPWEDIQENFLYYEEKLADILK

SEQ ID NO: 51 - protein, 224 aa, Mus musculus
  REGION 1..224: note = MISC_FEATURE - Mouse APOBEC-2 polypeptide sequence
MAQKEEAAEAAAPASQNGDDLENLEDPEKLKELIDLPPFEIVTGVRLPVNFFKFQFRNVEYSSGRNKTFLCYVVEVQSKGGQAQATQGYLEDEHAGAHAEEAFFNTILPAFDPALKYNVTWYVSSSPCAACADRILKTLSKTKNLRLLILVSRLFMWEEPEVQAALKKLKEAGCKLRIMKPQDFEYIWQNFVEQEEGESKAFEPWEDIQENFLYYEEKLADILK

SEQ ID NO: 52 - protein, 224 aa, Rattus sp.
  REGION 1..224: note = MISC_FEATURE - Rat APOBEC-2 polypeptide sequence
MAQKEEAAEAAAPASQNGDDLENLEDPEKLKELIDLPPFEIVTGVRLPVNFFKFQFRNVEYSSGRNKTFLCYVVEAQSKGGQVQATQGYLEDEHAGAHAEEAFFNTILPAFDPALKYNVTWYVSSSPCAACADRILKTLSKTKNLRLLILVSRLFMWEEPEVQAALKKLKEAGCKLRIMKPQDFEYLWQNFVEQEEGESKAFEPWEDIQENFLYYEEKLADILK

SEQ ID NO: 53 - protein, 208 aa, Petromyzon marinus
  REGION 1..208: note = MISC_FEATURE - Petromyzon marinus CDA1 (pmCDAl) polypeptide sequence
MTDAEYVRIHEKLDIYTFKKQFFNNKKSVSHRCYVLFELKRRGERRACFWGYAVNKPQSGTERGIHAEIFSIRKVEEYLRDNPGQFTINWYSSWSPCADCAEKILEWYNQELRGNGHTLKIWACKLYYEKNARNQIGLWNLRDNGVGLNVMVSEHYQCCRKIFIQSSHNQLNENRWLEKTLKRAEKRRSELSFMIQVKILHTTKSPAV

SEQ ID NO: 54 - protein, 381 aa, Homo sapiens
  REGION 1..381: note = MISC_FEATURE - Human APOBEC3G D316R D317R polypeptide sequence
MKPHFRNTVERMYRDTFSYNFYNRPILSRRNTVWLCYEVKTKGPSRPPLDAKIFRGQVYSELKYHPEMRFFHWFSKWRKLHRDQEYEVTWYISWSPCTKCTRDMATFLAEDPKVTLTIFVARLYYFWDPDYQEALRSLCQKRDGPRATMKFNYDEFQHCWSKFVYSQRELFEPWNNLPKYYILLHFMLGEILRHSMDPPTFTFNFNNEPWVRGRHETYLCYEVERMHNDTWVLLNQRRGFLCNQAPHKHGFLEGRHAELCFLDVIPFWKLDLDQDYRVTCFTSWSPCFSCAQEMAKFISKKHVSLCIFTARIYRRQGRCQEGLRTLAEAGAKISFTYSEFKHCWDTFVDHQGCPFQPWDGLDEHSQDLSGRLRAILQNQEN

SEQ ID NO: 55 - protein, 182 aa, Homo sapiens
  REGION 1..182: note = MISC_FEATURE - Human APOBEC3G chain A polypeptide sequence
MDPPTFTFNFNNEPWWGRHETYLCYEVERMHNDTWVLLNQRRGFLCNQAPHKHGFLEGRHAELCFLDVIPFWKLDLDQDYRVTCFTSWSPCFSCAQEMAKFISKNKHVSLCIFTARIYDDQGRCQEGLRTLAEAGAKISFTYSEFKHCWDTFVDHQGCPFQPWDGLDEHSQDLSGRLRAILQ

SEQ ID NO: 56 - protein, 184 aa, Homo sapiens
  REGION 1..184: note = MISC_FEATURE - Human APOBEC3G chain A D120R D121R polypeptide sequence
MDPPTFTFNFNNEPWVRGRHETYLCYEVERMHNDTWVLLNQRRGFLCNQAPHKHGFLEGRHAELCFLDVIPFWKLDLDQDYRVTCFTSWSPCFSCAQEMAKFISKNKHVSLCIFTARIYRRQGRCQEGLRTLAEAGAKISFMTYSEFKHCWDTFVDHQGCPFQPWDGLDEHSQDLSGRLRAILQ

SEQ ID NO: 57 - protein, 367 aa, Homo sapiens
  REGION 1..367: note = MISC_FEATURE - hAPOBEC-4 polypeptide sequence
MEPIYEEYLANHGTIVKPYYWLSFSLDCSNCPYHIRTGEEARVSLTEFCQIFGFPYGTTFPQTKHLTFYELKTSSGSLVQKGHASSCTGNYIHPESMLFEMNGYLDSAIYNNDSIRHIILYSNNSPCNEANHCCISKMYNFLITYPGITLSIYFSQLYHTEMDFPASAWNREALRSLASLWPRVVLSPISGGIWHSVLHSFISGVSGSHVFQPILTGRALADRHNAYEINAITGVKPYFTDVLLQTKRNPNTKAQEALESYPLNNAFPGQFFQMPSGQLQPNLPPDLRAPVVFVLVPLRDLPPMHMGQNPNKPRNIVRHLNMPQMSFQETKDLGRLPTGRSVEIVEITEQFASSKEADEKKKKKGKK

SEQ ID NO: 58 - protein, 388 aa, Rattus norvegicus
  REGION 1..388: note = MISC_FEATURE - rAPOBEC-4 polypeptide sequence
MEPLYEEYLTHSGTIVKPYYWLSVSLNCTNCPYHIRTGEEARVPYTEFHQTFGFPWSTYPQTKHLTFYELRSSSGNLIQKGLASNCTGSHTHPESMLFERDGYLDSLIFHDSNIRHIILYSNNSPCDEANHCCISKMYNFLMNYPEVTLSVFFSQLYHTENQFPTSAWNREALRGLASLWPQVTLSAISGGIWQSILETFVSGISEGLTAVRPFTAGRTLTDRYNAYEINCITEVKPYFTDALHSWQKENQDQKVWAASENQPLHNTTPAQWQPDMSQDCRTPAVFMLVPYRDLPPIHVNPSPQKPRTVVRHLNTLQLSASKVKALRKSPSGRPVKKEEARKGSTRSQEANETNKSKWKKQTLFIKSNICHLLEREQKKIGILSSWSV

SEQ ID NO: 59 - protein, 363 aa, Macaca fascicularis
  REGION 1..363: note = MISC_FEATURE - mfAPOBEC-4 polypeptide sequence
MEPTYEEYLANHGTIVKPYYWLSFSLDCSNCPYHIRTGEEARVSLTEFCQIFGFPYGTTYPQTKHLTFYELKTSSGSLVQKGHASSCTGNYIHPESMLFEMNGYLDSAIYNNDSIRHIILYCNNSPCNEANHCCISKVYNFLITYPGITLSIYFSQLYHTEMDFPASAWNREALRSLASLWPRVVLSPISGGIWHSVLHSFVSGVSGSHVFQPILTGRALTDRYNAYEINAITGVKPFFTDVLLHTKRNPNTKAQMALESYPLNNAFPGQSFQMTSGIPPDLRAPVVFVLLPLRDLPPMHMGQDPNKPRNIIRHLNMPQMSFQETKDLERLPTRRSVETVEITERFASSKQAEEKTKKKKGKK

SEQ ID NO: 60 - protein, 218 aa, Rattus norvegicus
  REGION 1..218: note = MISC_FEATURE - rAPOBEC-1 (delta 177-186) polypeptide sequence
MSSETGPVAVDPTLRRRIEPHEFEVFFDPRELRKETCLLYEINWGGRHSIWRHTSQNTNKHVEVNFIEKFTTERYFCPNTRCSITWFLSWSPCGECSRAITEFLSRYPHVTLFIYIARLYHHADPRNRQGLRDLISSGVTIQIMTEQESGYCWRNFVNYSPSNEAHWPRYPHLWVRGLPPCLNILRRKQPQLTFFTIALQSCHYQRLPPHILWATGLK

SEQ ID NO: 61 - protein, 218 aa, Rattus norvegicus
  REGION 1..218: note = MISC_FEATURE - rAPOBEC-1 (delta 202-213) polypeptide sequence
MSSETGPVAVDPTLRRRIEPHEFEVFFDPRELRKETCLLYEINWGGRHSIWRHTSQNTNKHVEVNFIEKFTTERYFCPNTRCSITWFLSWSPCGECSRAITEFLSRYPHVTLFIYIARLYHHADPRNRQGLRDLISSGVTIQIMTEQESGYCWRNFVNYSPSNEAHWPRYPHLWVRLYVLELYCIILGLPPCLNILRRKQPQHYQRLPPHILWATGLK

SEQ ID NO: 62 - protein, 198 aa, Mus musculus
  REGION 1..198: note = MISC_FEATURE - mouse cytidine deaminase polypeptide sequence
  REGION 1..30: note = MISC_FEATURE - Nuclear localization sequence
  REGION 183..198: note = MISC_FEATURE - Nuclear export signal
MDSLLMKQKKFLYHFKNVRWAKGRHETYLCYVVKRRDSATSCSLDFGHLRNKSGCHVELLFLRYISDWDLDPGRCYRVTWFTSWSPCYDCARHVAEFLRWNPNLSLRIFTARLYFCEDRKAEPEGLRRLHRAGVQIGIMTFKDYFYCWNTFVENRERTFKAWEGLHENSVRLTRQLRRILLPLYEVDDLRDAFRMLGF

SEQ ID NO: 63 - protein, 224 aa, Petromyzon marinus
  REGION 1..224: note = MISC_FEATURE - pmCDA-1 polypeptide sequence
MAGYECVRVSEKLDFDTFEFQFENLHYATERHRTYVIFDVKPQSAGGRSRRLWGYIINNPNVCHAELILMSMIDRHLESNPGVYAMTWYMSWSPCANCSSKLNPWLKNLLEEQGHTLTMHFSRIYDRDREGDHRGLRGLKHVSNSFRMGVVGRAEVKECLAEYVEASRRTLTWLDTTESMAAKMRRKLFCILVRCAGMRESGIPLHLFTLQTPLLSGRVVWWRV

SEQ ID NO: 64 - protein, 331 aa, Petromyzon marinus
  REGION 1..331: note = MISC_FEATURE - pmCDA-2 polypeptide sequence
MELREVVDCALASCVRHEPLSRVAFLRCFAAPSQKPRGTVILFYVEGAGRGVTGGHAVNYNKQGTSIHAEVLLLSAVRAALLRRRRCEDGEEATRGCTLHCYSTYSPCRDCVEYIQEFGASTGVRVVIHCCRLYELDVNRRRSEAEGVLRSLSRLGRDFRLMGPRDAIALLLGGRLANTADGESGASGNAWVTETNVVEPLVDMTGFGDEDLHAQVQRNKQIREAYANYASAVSLMLGELHVDPDKFPFLAEFLAQTSVEPSGTPRETRGRPRGASSRGPEIGRQRPADFERALGAYGLFLHPRIVSREADREEIKRDLIVVMRKHNYQGP

SEQ ID NO: 65 - protein, 209 aa, Petromyzon marinus
  REGION 1..209: note = MISC_FEATURE - pmCDA-5 polypeptide sequence
MAGDENVRVSEKLDFDTFEFQFENLHYATERHRTYVIFDVKPQSAGGRSRRLWGYIINNPNVCHAELILMSMIDRHLESNPGVYAMTWYMSWSPCANCSSKLNPWLKNLLEEQGHTLMMHFSRIYDRDREGDHRGLRGLKHVSNSFRMGVVGRAEVKECLAEYVEASRRTLTWLDTTESMAAKMRRKLFCILVRCAGMRESGMPLHLFT

SEQ ID NO: 66 - protein, 158 aa, Saccharomyces cerevisiae
  REGION 1..158: note = MISC_FEATURE - yCD polypeptide sequence
MVTGGMASKWDQKGMDIAYEEAALGYKEGGVPIGGCLINNKDGSVLGRGHNMRFQKGSATLHGEISTLENCGRLEGKVYKDTTLYTTLSPCDMCTGAIIMYGIPRCVVGENVNFKSKGEKYLQTRGHEVVVVDDERCKKIMKQFIDERPQDWFEDIGE

SEQ ID NO: 67 - protein, 194 aa, synthetic construct
  REGION 1..194: note = cytidine deaminase polypeptide sequence
MKPQIRDHRPNPMEAMYPHIFYFHFENLEKAYGRNETWLCFTVEIIKQYLPVPWKKGVFRNQVDPETHCHAEKCFLSWFCNNTLSPKKNYQVTWYTSWSPCPECAGEVAEFLAEHSNVKLTIYTARLYYFWDTDYQEGLRSLSEEGASVEIMDYEDFQYCWENFVYDDGEPFKRWKGLKYNFQSLTRRLREILQ

SEQ ID NO: 68 - protein, 192 aa, synthetic construct
  REGION 1..192: note = cytidine deaminase polypeptide sequence
MADSSEKMRGQYISRDTFEKNYKPIDGTKEAHLLCEIKWGKYGKPWLHWCQNQRMNIHAEDYFMNNIFKAKKHPVHCYVTWYLSWSPCADCASKIVKFLEERPYLKLTIYVAQLYYHTEEENRKGLRLLRSKKVIIRVMDISDYNYCWKVFVSNQNGNEDYWPLQFDPWVKENYSRLLDIFWESKCRSPNPW

SEQ ID NO: 69 - protein, 280 aa, synthetic construct
  REGION 1..280: note = cytidine deaminase polypeptide sequence
MDPQRLRQWPGPGPASRGGYGQRPRIRNPEEWFHELSPRTFSFHFRNLRFASGRNRSYICCQVEGKNCFFQGIFQNQVPPDPPCHAELCFLSWFQSWGLSPDEHYYVTWFISWSPCCECAAKVAQFLEENRNVSLSLSAARLYYFWKSESREGLRRLSDLGAQVGIMSFQDFQHCWNNFVHNLGMPFQPWKKLHKNYQRLVTELKQILREEPATYGSPQAQGKVRIGSTAAGLRHSHSHTRSEAHLRPNHSSRQHRILNPPREARARTCVLVDASWICYR

SEQ ID NO: 70 - protein, 555 aa, synthetic construct
  REGION 1..555: note = pYY-BEM3.1; tr|F7B644|F7B644_HORSE polypeptide sequence
MPRGRARERQRRNPMEKLDAEAFSFHFLNMEFVYDRNCSYLCYQVEGRLSGSPVLSEQGVFPNEVCGKTRRHAELCFLDWFRGRLSPDEYYCVTWFISWSPCSNCAREVAEFLKRHRNVELSIFAARLYYCRDHEQGLQSLCNRGAQLAVMLRKDFTYCWDNFVHNSGREFSPWENIDANSDLLARKLEDLLKNPMEKLHRKTFSFHFRNLKFAKGRKCSYLCYRVEGRLSGSPGLSEQGVFLNEVCDENCRHAELCFLHWFRGRLSPHADYRVTWFISWSPCSNCAREVAEFLKQHRNVELHISAARLYYWQRNKPGLRNLRSSGAQLAIMFFWDFRDCWDNFVHNSGRHFIPWKKINVNSRLLATKLEDLLKNPLEKLHPNTFSFHFCNLEFAYDRKYSYLCYQVEGRLSGSPGLSEQGVFLNEVCGKTRCHAELCFLDWFRVRLSPDEYYRVTWFISWSPCFYCAREVADFLKQYRNVKLSIFAARLYYCRDHAQGLRSLCSSGAQLAIMFFWDFRYCWDNFVHNSGREFRPWKKINVNSRLLATKLEDILK

SEQ ID NO: 71 - protein, 437 aa, synthetic construct
  REGION 1..437: note = pYY-BEM3.2; tr|D1LZA1|D1LZA1_PANTI polypeptide sequence
MEPWRPSPRNPMDRIDPKTFRFQFPNLRYASGRKLCYLCFQVERDYFYYNDSDWGVFRNEVHPWAPCHAEQCFLSWFRDQYPYRDEDYNVTWFLSWSPCPTCAEEVVEFLEEYRNLTLSIFTSRLYYFWHPNYQEGLCKLWDAGVQLDIMSCDEFEYCWDNFVYHKGMRFQRRNLLKDYDFLAAKLQEILSPGQQRKRDWPFPPRPGAQVDPRSWVQEVTEPGINTRRHPLHLLVSFLLPRPTMNPLQEDIFYRQFGNQHRVPKPYYYRRKTYLCYQLKLPEGTLIDKDCLRNKKKRHAEICFIDKIKSLTRDTSQRFEIICYITWSPCPFCAEELVAFVKDNPHLSLRIFASRLYVHWRWKYQQGLRHLHASGIPVAVMSLPEFEDCWRNFVDHQDRLFQPWRNLDQYSESIKRRLGKILTPLNDLRNDFRNLKLE

SEQ ID NO: 72 - protein, 440 aa, synthetic construct
  REGION 1..440: note = pYY-BEM3.3; tr|A0A3Q0DM17|A0A3Q0DM17_TARSY polypeptide sequence
MPMKRMYSNIYFDHFNNQRLLSGQNAPWLCFKVERVENCMLVPLETGVFGNQVSGCCGKTERPVEPTSLTRSVLVSPNPGTELRAQQPSRKGHLGKLGCVEYPSPGLALVMLGYGASTYCPDSSMYCPETCHHPEMCFLYWFEKTLSHEEQYQITWYVSWSPCVNCAEEVAEFLSVHPKVNLTIYAARLYCYQKLNHRQGLRRLCKEGACVKIMNYEEFDHCWENFVYNNYKSFKPWVKLQDNYELLATELDKILRIPMERMPQKKFRFHFQNLIAKDRNTTWLCFEVKNVRKKHPPDLLERGIFQNQVTPRINCHAEMCFLSWFLENMLLHGKRYQVTWYISWSPCSICAEEVAEFLSAHPKVSLTIYAARLYYFWVPGYRQGLRRLVEEGARVEIMNYEEFDYCWENFVSINNEPFQPWEGLHEKYGYLVTKLNNILG

SEQ ID NO: 73 - protein, 453 aa, synthetic construct
  REGION 1..453: note = pYY-BEM3.4; tr|A0A3Q0DNJ5|A0A3Q0DNJ5_TARSY polypeptide sequence
MEDNPEPRPRQQMDQDTFIFNFNNDPSVRGRHQTFLCYEVEHLDDDTWVPQDKYLGFLHNQPQSRSNAYCAYHAELCFLELVSSWQLDPAQRYRVTCFISWSPCSSCAQEVAAFLKKNRHVTLRILAARIYDYYQGYEDGLRTLQGVGVDITVMTSAEFGHCWNTFVDHQGSPFQPWEGLDQHSQVIWQRMQDILQVIPAKYLMEKVKYTVTVDILFKGRVPGPRYLMDQNTFTRNFINNLSVSGRRQTLLCYEVERLGGDIWVPLDQLRGFLLSQARDVLNYYQGRHAEPCFLDLVSSWQLDPAQHYRVTWFISWSPCTSCAQAVAAFLRENRHVTLRILAARIYDYHQGYEEGLRTLQRTGAHIDIMTFKEFGHCWNTFVNHKGSPFKSWTGLDQHSQALRKRLQDILHTMASSLWDQSEPKKPIPSQEVTLPESIPPSHGNRFRLVKRPS

SEQ ID NO: 74 - protein, 424 aa, synthetic construct
  REGION 1..424: note = pYY-BEM3.5; tr|G5AYU5|G5AYU5_HETGA polypeptide sequence
FCFLSCVHRKPIERIYKKAFRFYFRNLRCAYGRNKTFLCYEVKRERDNKVLHKGVVLNQVEPYMPLHAELRFLSWFHDTLLCPLGSYQVTLYVSWSPCSECAEELTTFLAGHRNVTMTIYVAQLYYCNWKSPNREGLKILIAEDARLRVMFYDEFLYCWRNFVKNDYNNFDPWSLLDENSRYHNRILQNILKGWGRPHRVGPEGEQTATPGGSGGHCISVFSLLRRREMTLKEETFRVQFNNAYKAPKPYRRRVTYLCYQLQEANGDPLTKGCLRTKKGYHAESRFIKRICSMDLGQDQSYQVTCFLTWSPCPHCAQELVSFKRAHPHLRLQIFTARLFFHWKRSYQEGLQRLCRAQVPVAVMGHPEFAYCWDNFVDHQPGPFEPPWAKLEYYSSCLKRRLQQILRSWGVDDLTNDFRNLQLGP

SEQ ID NO: 75 - protein, 385 aa, synthetic construct
  REGION 1..385: note = pYY-BEM3.6; tr|A0A2Y9QMV5|A0A2Y9QMV5_TRIMA polypeptide sequence
MLSSPQTPGTRKPMKTLAPDEFSFNFENLRLAHGRNTTFLCFQVETKAPPSLNSPDSGIFQNQDHCPSHHHAEMVFLTWFQKRLSPAQHYEVTWYMSWSPCSRCAVQVAKFLKSNSTVNLSIFVARLYYPRELETKDGLHSLWQAGAQVQIMFFQDFKYCWENFVNNEGKPFQPWKNLDENSKDWDTELKDIHRNTTDLLTEEMFYSQFYNREKKSSIPRKTYLCYQLNEPQPVKRCLHYKKGYHAVTRFIDGIVSMNLDPARSYDITCYFTWSPCNRYARKLVSFIEDYPNLRLKVYTSRLYFHWCWTNMQGLQHLQNSRVTVAVMTFRDFEYCWKNFVDNQGKPFEPWEKLDLYSQSTERRLRRILKPLTPDVLNEDFGNLHL

SEQ ID NO: 76 - protein, 381 aa, synthetic construct
  REGION 1..381: note = pYY-BEM3.7; tr|H0XHI0|H0XHI0_OTOGA polypeptide sequence
LSCAFRDPMNRMYPKTFCQNFEKEPCPSNQNSSWLCFEVETKNSAVFFHRGVFRNQPAPPPRAPTSVLLSQGPVKTPCHAEECFLTWIQGVLPPDHHYHVTWYVSRGPCANCANLIVHFLAMHRRVTLTIFAAHLNFFWESDFQQGLLRMDQEGVQLHIMGYEEFEYCWDNFVYNQRKQFVPWNGLNENYEFMVSTLEDILRSPLDRIRQKDFSIHFRNSLWLDDKSTWLCFEVKRTKSPVPLYRGVFRNQSPPKTPCHAEVRFFTWLQDLPPDFCCQFTWYLSWSPCADCADLVANFLAKHRNVSLTIFVARLYYYRDPEMHRGLRRMYQEGANVDIMSVIEFEYCWDNFVYNQGKQFVPWNGLNENYEFLVPRLQEILE

SEQ ID NO: 77 - protein, 337 aa, synthetic construct
  REGION 1..337: note = pYY-BEM3.8; tr|A0A3M0K4Y7|A0A3M0K4Y7_HIRRU polypeptide sequence
MYISKKALRRHFDPRVYPRETYLLCELQWEGSRRVWIHWIRNVPDHHAEEYFLEEVFEPRNYGFCNITLYLSWSPCCTCCSKIRDFLKRNPNVKIDIRVARLIYPDYAETRSSLRELNGLQRVSIQVMEAAGLSCIESKNHRISQVERDPKGSSSPTLFTLQDHLKLSNMTESVIQDSVSIQICYQMRILGFQCHIRWKLQPEDFQRNYSPNQIGRVVYLLYEVRWRRGSIWRNWCSNNPEQHAEVNFLENHFHHRPQTPCSITWFLSTSPCGKCSRRILEFLKSQPNVTLEIYAAKLFRHHDIRNRQGLRNLMMNGVTIYIMNLEGNPASLCLSVD

SEQ ID NO: 78 - protein, 237 aa, synthetic construct
  REGION 1..237: note = pYY-BEM3.9; tr|A0A3P4LUZ8|A0A3P4LUZ8_GULGU polypeptide sequence
MSFEDYEYCWETFVDHKGMYFQSWDLLRDNDLLAAELKNILRSTMNPLRQEIFYHQFGNQPRAPRPYHRRKTYLCYQLQPHEGPITARVCLQNKKKRHAEIRFIDNIRALRLDRSQTFEITCYLTWSPCPTCAKALAVFVQDHPHISLRLFASRLFIHWCWKYQEGLRLLHRSRIPVAVMRLQEFEDCWRNFVDNQDEPFQPWNKLEQYSESITRRLRRILGHPQNNLENDFRNLHI

SEQ ID NO: 79 - protein, 221 aa, synthetic construct
  REGION 1..221: note = pYY-BEM3.10; tr|G5BPM8|G5BPM8_HETGA polypeptide sequence
RRRIEPWQFEASFDPRQLRRETCLLSEVRWGTSPRAWRGCSLNTARHAEVSFMDRLTSEGRLRGPVRCSITWFLSWSPCGACAQAIGEFLRQHPNVSLVIYIARLFWHVDEQNRQGLRDLVTRGVRMQVMSDPEFAHCWRNFVNYSPGQEARWPQVPPVWTWLYSLELHCILLNLPPCLKISRRHHNQLTFFQLILQNCHYQAIPSPVLLASGLIHPFVTW

SEQ ID NO: 80 - protein, 211 aa, synthetic construct
  REGION 1..211: note = pYY-BEM3.11; tr|H2M862|H2M862_ORYLA polypeptide sequence
MITKLDSVLLPKKKFIYHYKNMRWARGRHETYLCFVVKRRVGPESLSFDFGHLRNRNGCHVELLFLRHLSALCPGLWGYGATGQGRVSYSITWFCSWSPCANCSFRLAQFLSQTPNLRLRIFVSRLYFCDLEDSREREGLRMLKKVGVHITVMSYKDYFYCWQTFVARKQSKFKPWDGLHQNSVRLSRKLNRILQPCETEDFRDAFKLLGL

SEQ ID NO: 81 - protein, 353 aa, synthetic construct
  REGION 1..353: note = pYY-BEM3.12; tr|H0Y0C6|H0Y0C6_OTOGA polypeptide sequence
MYLKTFYRHFNNRPYLSRRNDTWLCFEVKTTSSNSPGSFYSGVFRNQGPRYCPWHTELCFLTWVRPIVSHHHFYQITWYMSWSPCANCAWQVATFLATHENVSLTNYTVRIYYFWRQDYRQGLLRMIEEGTQVYVMSSKEFQHCWENFVDHWGTRWVTCWNRLKKNYEFLVTRLSEILSDPKERISPNTFYNQFNNTPVPRGRKDTWLCFEVKEKNSNSPGSFHRGVFQNQVFSGTSSHARRCPPDHHYEVTWYTSWSPCAHCAWHVVNFLTSNPNVSLTIFAARLYYIYRPEIQQGLRRVFQEGAKVHIMSLKEFKYCWAKLVYNSGMRFMPWYQFNFNFLFPNTTLKGDLH

SEQ ID NO: 82 - protein, 189 aa, synthetic construct
  REGION 1..189: note = pYY-BEM3.13; tr|A0A3Q2Z5X6|A0A3Q2Z5X6_HIPCM polypeptide sequence
MDVHFMNFIYHYKNMRWAKGRNETYLCFVVKRRVGPNSLTFDFGHLRNRNGCHVELLFLRYLGRRLSYSITWFCSWSPCANCSAALSQFLSRMPNLRLRIFVARLYFCDMEDSHEREGLRLLQKAGVQVTVMSYKDYYYCWQTFVDRKKSHFKAWEDLHQNSVRLSRKLNRILQPCEMDLRDAFKLLGL

SEQ ID NO: 83 - protein, 190 aa, synthetic construct
  REGION 1..190: note = pYY-BEM3.15; tr|A0A2K6NY90|A0A2K6NY90_RHIRO polypeptide sequence
MNPHIRNPMEAMYPGTFYFHFKNLWEADNRNESWLCFAVEVIKHHSTVSWKRGVFRNQVDPETHCHAEKCFLSWFCDNTLSPKKNYQVTWYTSWSPCPECAREVAKFLARHSNVMLTIYTARLYYSQYPNYQEGLRRLNEEGVPVEIMDYEDFKYCWENFVYNGDELFKPWKGLKYNFLFLDSKLQEILE

SEQ ID NO: 84 - protein, 202 aa, synthetic construct
  REGION 1..202: note = pYY-BEM3.16; tr|Q6ICH2|Q6ICH2_HUMAN polypeptide sequence
MNPQIRNPMERMYRDTFYDNFENEPILYGRSYTWLCYEVKIKRGRSNLLWDTGVFRGPVLPKRQSNHRQEVDPETHCHAERCFLSWFCDDILSPNTNYEVTWYTSWSPCPECAGEVAEFLARHSNVNLTIFTARLCYFWDTDYQEGLCSLSQEGASVKIMGYKDFVSCWKNFVYSDDEPFKPWKGLQTNFRLLKRRLREILQ

SEQ ID NO: 85 - protein, 202 aa, synthetic construct
  REGION 1..202: note = pYY-BEM3.17; tr|G8GPV1|G8GPV1_CERNE polypeptide sequence
MDGSPASRPGHVMDPGTFTSNFNNKPWVSGQRETYLCYKVERSHNDTWVLLNQHRGFLRNQAKNRLHGDYGCHAELCFLGEVPSWRLDPTQTYRVTWFISWSPCFSGGCAEQVRAFLQENTHVRLRIFAARIYDYDFLYQEALRTLRDAGAQVSIMTYEEFKHCWDTFVDHQGRPFQPWDGLDEHSQALSGRLQAILQNQGN

SEQ ID NO: 86 - protein, 181 aa, synthetic construct
  REGION 1..181: note = pYY-BEM3.18; tr|Q1WBT6|Q1WBT6_SYMSY polypeptide sequence
MALLTAKTFRLQFNNKRRVTKPYYPRKALLCYQLTPQNGSTPTRGYFKNKKKRHAEIRFINKIKSMGLDETQCYQVTCYLTWSPCPSCAWELVDFIKAHDHLNLGIFASRLYYHWCRHQQEGLRLLCGSQVPVEVMGFPEFADCWENFVDHEEPLSFNPSEMLEELDKNSRAIKRRLEKIK

SEQ ID NO: 87 - protein, 211 aa, synthetic construct
  REGION 1..211: note = pYY-BEM3.19; tr|A0A3B4CS14|A0A3B4CS14_PYGNA polypeptide sequence
MDNTNRRKFIYHYKNVRWARGRHETYLCFVVKKRNSPDSLSFDFGHLRNRNGCHVELLFLRYIEVLCPGLWGSGVDGVRVSYAVTWFCSWSPCSNCAQRLTNFLSQTPNLRLRIFVARLYFCDEEDSLEREGLRHLQRAGVQITVMTYKDFFYCWQTFVASRERCFKAWEGLRQNSVRLSRKLNRILQVFISTPVISPLITTHLGQSWAGG

SEQ ID NO: 88 - protein, 315 aa, synthetic construct
  REGION 1..315: note = pYY-BEM3.20; tr|A0A087XZI4|A0A087XZI4_POEFO polypeptide sequence
RKVSYSVTWFCSWSPCANCSIRLAQFLHQTPNLRLRIFVSRLYFCDLEDSREREGLRILKKAGVHITVMSYKDYFYCWQTFVAKSQSKFKPWDGLHQNYIRLSRKLNRILQPALDIKKFIYHYKNLRWARGRCETYLCFVVKKKLHLFMFVIVGRNRLFDLNVTMNNKSLYLIPLHLQLLFLRHLGALCPGLWGYGVTGERKVSYSVTWFCSWSPCANCSIRLAQFLHQTPNLRLRIFVSRLYFCDLEDSREREGLRILKKAGVHITVMSYKDYFYCWQTFVAKSQSKFKPWDGLHQNYIRLSRKLNRILQVQFF

SEQ ID NO: 89 - protein, 189 aa, synthetic construct
  REGION 1..189: note = pYY-BEM3.21; tr|A0A341AEK4|A0A341AEK4_9CETA polypeptide sequence
MASDRGPSAGDATSRRRIEPWEFEVSFDPRELCKETRLLYEIKWGRSQHVWRHSGKNTTNHVECNFIEKFTSERPFHRSVSCCITWFLSWSPCWECSKAIREFLNQHPRVTLFIYVARLFQHMDPQNRQGLRDLIHSGVTIQIMGPTEYDYCWRNFVNYPPGKEAHWPRYPPPLMKLYALELHCIILVP

SEQ ID NO: 90 - protein, 180 aa, synthetic construct
  REGION 1..180: note = pYY-BEM3.22; tr|E2D879|E2D879_MUSMI polypeptide sequence
RNLISRETFNFNFENLCYAKGRKNTFLCYEVTRKDCDSPVSLCHGVFKNKGSIHAEICFLYWFHDKVLKVLTPREEFKVTWYMSWSPCFECAEQVVRFLATHHNLNLTIFSSRLYNVSDPDTQQKLCRLVQEGAQVAVMDLSEFKKCWEKFVDNDGQQFRPWKRLRTNFRYQNSKLQEIL

SEQ ID NO: 91 - protein, 221 aa, synthetic construct
  REGION 1..221: note = pYY-BEM3.23; tr|A0A2K5RDN6|A0A2K5RDN6_CEBCA polypeptide sequence
MWEAQSPGLSREWGSVAISPEDPGPLHIGRFLSCAFRHPMNAMYPGIFNFHFRNLRKAYGRNETWLCFTVEGIMNRSTVSWKSGVFRNQVGSDPFCHAEMCFLSWFRHNMLSPKKDYEVTWYASWSPCPECAGQVAEFLARHGNVRLTIFTAHLYYFWNPSFRQGLRRLSQEGASVLIMGYEDFEYCWDNFVYNDGQPFKPWKRLQDNSLSLYITLQEILQ

SEQ ID NO: 92 - protein, 206 aa, synthetic construct
  REGION 1..206: note = pYY-BEM3.24; tr|A0A2K5RDN7|A0A2K5RDN7_CEBCA polypeptide sequence
MEASPASRPRPLMGPRTFTENFTNNPEVFGRHQTYLCYEVKCQGPDGTRDLMTEQRDFLCNQARNLLSGFDGRHAERCFLDRVPSWRLDPAQTYRVTCFISWSPCFSCAREVAEFLQENPHVNLRIFAARIYDCRPRYEEGLQMLQNAGAQVSIMTSEEFRHCWDTFVDHQGHPFQPWEGLDEHSQALSRRLQAILQGNRWMILSL

SEQ ID NO: 93 - protein, 184 aa, synthetic construct
  REGION 1..184: note = pYY-BEM3.25; tr|A0A1C9CJ69|A0A1C9CJ69_CERAL polypeptide sequence
NPMKAMDPHIFYFHFKNLRKAYGRNETWLCFAVEIIKQRSTVPWRTGVFRNQVDPESHCHAERCFLSWFCEDILSPNTDYRVTWYTSWSPCLDCAGEVAEFLARHSNVELAIFAARLYYFWDTHYQQGLRSLSEKGASVEIMGYEDFKYCRENFVCDDGKPFKPWKGLKTNFRFLKRRLQEILE

SEQ ID NO: 94 - protein, 197 aa, synthetic construct
  REGION 1..197: note = pYY-BEM3.26; tr|A0A2R2Z4D2|A0A2R2Z4D2_PTEAL polypeptide sequence
MHLQVWRKVTEAWREGYTLKPWSRNPMERLYHDYFYFHFYNLPTPKHRNGCYICYQVEGTKKHSRMPLLRGVFENQESLDMMLSPGEKYRVTWYISWSPCFACVDEVIKFLREHTNVELIIFAARLYHSDILQYRQGLRKLHDAGVHVAIMSYYEFKHCLNDFVFHQGRSFCPWNDLNKNSKNLSNTLEDILRNQED

SEQ ID NO: 95 - protein, 206 aa, synthetic construct
  REGION 1..206: note = pYY-BEM3.27; tr|B7T161|B7T161_SHEEP polypeptide sequence
MTEGWAGSGLPGRGDCVWTPQTRNTMNLLRETLFKQQFGNQPRVPPPYYRRKTYLCYQLKELDDLMLDKGCFRNKKQRHAEIRFIDKINSLNLNPSQSYKIICYITWSPCPNCASELVDFITRNDHLNLQIFASRLYFHWIKPFCRGLHQLQKAGISVAVMTHTEFEDCWEQFVDNQLRPFQPWDKLEQYSASIRRRLQRILTAPT

SEQ ID NO: 96 - protein, 205 aa, synthetic construct
  REGION 1..205: note = pYY-BEM3.28; tr|A0A2R2X2G4|A0A2R2X2G4_PTEAL polypeptide sequence
MAGLGQACEGCCGQMPEISYPMGRLDPKTFSFEFKNLPYAYGRKSSYLCFQVEREQHSSPVPSDWGVFKNQFCGTEPYHAELCFLNWFRAEKLSPYEHYDVTWFLSWSPCSTCAEEIAIFLSNHKNVRLNIFVSRIYYFWKPAFRQGLQELDHLGVQLDAMSFDEFKYCWENFVDNQGMPFRCWKKVHQNYKSVLRKLNEILRRR

SEQ ID NO: 97 - protein, 309 aa, synthetic construct
  REGION 1..309: note = pYY-BEM3.29; tr|G1Q1M4|G1Q1M4_MYOLU polypeptide sequence
YAELSFLDLFQSWNLDRGRQYRLTWYMSWSPYPDCAQKLVEFLGENSHVTLRIFAADIHSLCSGYEDGLRKLRDARAQLAIMTRDELQYCWVTFVDNQGQPFRPWPNLVEHIKTKKQELKDILGNPMRRMYPKTFNFNFQNLNSYGRKSTFLCFEVETWEDGSVLDYQNGVFQNQLDPGHAELCFIEWFHEKVLFPDEVRCPDAQYHVTWYISWSPCFECAEQVAGFLNEHENVDLSISAARLYLCEDEDEQGLQDLVAAGAKVAMMAPEDFEYCWDNFVYNRGWPFTYWKHVRRNYGRLQEKLDEILW

SEQ ID NO: 98 - protein, 216 aa, synthetic construct
  REGION 1..216: note = pYY-BEM3.30; tr|A0A1S3AN78|A0A1S3AN78_ERIEU polypeptide sequence
RRIEPWEFEDFFDPRQFRPETCLLYEVRWGSSRNAWRSTARNTTRHAEVNFLERFAAERHFDKPVSCSITWFLSWSPCWECSQAIGAFLSQHPQVTLAIHVTRLFHHEDEQNRQGLRDLLARGVTLQVMGDSEYAHCWRTFVNSPPGAEGHYPRYPSDFTRLYALELHCIILGLPPCLEILRRYQNQFTLFRLVPQNCHYQMIPHLNFFVVRHYFF

SEQ ID NO: 99 - protein, 201 aa, synthetic construct
  REGION 1..201: note = pYY-BEM3.32; tr|Q4VUI3|Q4VUI3_XENLA polypeptide sequence
MTMDSMLLKRNKFIYHYKNLRWARGRHETYLCYIVKRRYSSVSCALDFGYLRNRNGCHAEMLFLRYLSIWVGHDPHRNYRVTWFSSWSPCYDCAKRTLEFLKGHPNFSLRIFSARLYFCEERNAEPEGLRKLQKAGVRLSVMSYKDYFYCWNTFVETRESGFEAWDGLHENSVRLARKLRRILQPPYDMEDLREVFVLLGL

SEQ ID NO: 100 - protein, 191 aa, synthetic construct
  REGION 1..191: note = pYY-BEM3.33; tr|E2RL86|E2RL86_CANLF polypeptide sequence
MNPLQEETFYQQFSNQRVPKPTYQRRTYLCYQLKPHEGSVIAKVCLQNQEKRHAEICFIDDIKSRQLDPSQKFEITCYVTWSPCPTCAKKLIAFVNDHPHISLRLFASRLYFHWRQKYKRELRHLQKSGIPLAVMSYLEFKDCWEKFVDHKGRPFQPWNKLKQYSESIGRRLQRILQPLNNLENDFRNLRL

SEQ ID NO: 101 - protein, 226 aa, synthetic construct
  REGION 1..226: note = pYY-BEM3.34; tr|G1LWB0|G1LWB0_AILME polypeptide sequence
SSAAPASIHLLDEDTFTENFRNDDWPSRTYLCYKVEGPDQGSGVPLGQDKGILHNKPAQGPEPSRHAECYLLEQIQSWNLDPKLHYGVTCFLSWSPCAKCAQKMARFLQENSHVSLKLFASRLYTRERWDEDYKEGLRTLKRAGASIAIMTYREFEHCWKTFVLHDQEGSCFQPWPFLHKESQKFSEKLQAILQVGVLLLSLPPPLPSSPLSSPWPFPAPLRASTG

SEQ ID NO: 102 - protein, 238 aa, synthetic construct
  REGION 1..238: note = pYY-BEM3.35; tr|A0A1U7S7K7|A0A1U7S7K7_ALLSI polypeptide sequence
MGEHWQYAGSGEYIPQDQFEENFDPSVLLAETHLLSELTWGGRPYKHWYENTEHCHAEIHFLENFSSKNRSCTITWYLSWSPCAECSARIADFMQENTNVKLNIHVARLYLHDDEHTRQGLRYLMKMKRVTIQVMTIPDYTYCWNTFLEDDGEDESDDYGGYAGVHEDEDESDDDDYLPTHFAPWIMLYSLELSCILQGFAPCLKIIQGNHMSPTFQLHVQDQEQKRLLEPANPWGAD

SEQ ID NO: 103 - protein, 220 aa, synthetic construct
  REGION 1..220: note = pYY-BEM3.36; tr|A0A2R2X2J8|A0A2R2X2J8_PTEVA polypeptide sequence
MPRIGNMNLLSEKTFNYHFGNQLRVKKPQGRRRTYLCYKLKLPNETLVKGYFINKKKNHAEIRFINKIRSLNLDQTQSYKITCYITWSPCSYCAGKLVALVKSCPHLSLQIFTSRLYYHWLWKNQAGLRYLWKINISVLVMKEPEFADCWDNFVNHQSRRFKPWEKLTQYSNSTERRLLRILRINRTDLFLAQSSEQDPGLNDLVDAIKRLFLDAHRPRD

SEQ ID NO: 104 - protein, 198 aa, synthetic construct
  REGION 1..198: note = pYY-BEM3.37; tr|A0A151P6M4|A0A151P6M4_ALLMI polypeptide sequence
MAVEEEKGLLGTSQGWKIELKDFQENYMPSTWPKVTHLLYEIRWGKGSKVWRNWCSNTLTQHAEVNCLENAFGKLQFNPPVPCHITWFLSWSPCCQCCRRILQFLRAHSHITLVIKAAQLFKHMDERNRQGLRDLVQSGVHVQVMDLPDYRYCWRTFVSHPHEGEGDFWPWFFPLWITFYTLELQHILLQQHALSYNL

SEQ ID NO: 105 - protein, 158 aa, synthetic construct
  REGION 1..158: note = pYY-BEM3.38; tr|A0A2K6MNR2|A0A2K6MNR2_RHIBE polypeptide sequence
IWLCFTMEIIKQCSTVSWKRGVFRNQVDPETHCHAERCFLSWFWEDTLSPNTNYQVTWYTSWSPCLDCAGEVAEFLARHSNVKLAIFAARLYYFWDTDYQQGLRSLSEEGTSVEIMGYEDFKYCWENFVYNGDEPFKPWKGLKYNFLFLDSKLQEILE

SEQ ID NO: 106 - protein, 182 aa, synthetic construct
  REGION 1..182: note = pYY-BEM3.40; tr|F1CGT0|F1CGT0_ANOCA polypeptide sequence
KAAILLSNLFFRWQMEPEAFQRNFDPREFPECTLLLYEIHWDNNTSRNWCTNKPGLHAEENFLQIFNEKIDIKQDTPCSITWFLSWSPCYPCSQAIIKFLEAHPNVSLEIKAARLYMHQIDCNKEGLRNLGRNRVSIMNLPDYRHCWTTFVVPRGANEDYWPQDFLPAITNYSRELDSILQD

SEQ ID NO: 107 - protein, 230 aa, synthetic construct
  REGION 1..230: note = pYY-BEM3.41; tr|C7AGG3|C7AGG3_HORSE polypeptide sequence
MDPQAPTQRGGLGQAYQGGDYVQAPGNGNTQHLLSEDVFKKQFGNQRRVTKPYYRRKTYVCYQLKLLRGPTIAKGYFRNKKKRHAEIRFIDKINSLGLDQDQSYEITCYVTWSPCATCACKLIKFTRKFPNLSLRIFVSRLYYHWFRQNQQGLRQLWASSIPVVVMGYQEFADCWENFADNRGNPFQSWEKLTEYSKGIKRRLQKILEPLNLNGLEDAMGNLKLGSVDLG

SEQ ID NO: 108 - protein, 197 aa, synthetic construct
  REGION 1..197: note = pYY-BEM3.42; tr|A0A250YMK7|A0A250YMK7_CASCN polypeptide sequence
MSLLKEDIFLYQFNNQQQVQKPYFRRRTYLCYQLEQPNGSRPQWPAKGCLQNKKGHHAEIRFIKRIHSMGLEQDQDYQITCYITWSPCLACACALAELKNHFPRLTLRIFASRLYFHWIRKFQMGLQHLYKSGVLVAVMSLPEFTDCWEKFVNHRQVFFTPWDKLEEHSRSIQRRLRRILQSWDVDDLTDDFRNLRL

SEQ ID NO: 109 - protein, 189 aa, synthetic construct
  REGION 1..189: note = pYY-BEM3.43; tr|B7T160|B7T160_SHEEP polypeptide sequence
MPWISDHVARLDPETFYFQFHNLLYAYGRNCSYICYRVKTWKHRSPVSFDWGVFHNQVYAGTHCHSERRFLSWFCAKKLRPDECYHITWFMSWSPCMKCAELVAGFLGMYQNVTLSIFTARLYYFQKPQYRKGLLRLSDQGACVDIMSYQEFKYCWKKFVYSQRRPFRPWKKLKRNYQLLAAELEDILG

SEQ ID NO: 110 - protein, 541 aa, synthetic construct
  REGION 1..541: note = pYY-BEM4.1; tr|A0A182D0J1|A0A182D0J1_BLAVI polypeptide sequence
MTNPESPPQAPCDFNEDALLNREPLRGSPIKFVSPVDYPDLVFALAGPVGVDIDYIQQSISDCLKSFDYSTEFIRITEIMQDIKCSKTIDCTDMLKEYQSKIEYANELRRAYRAKDLLAALTISAISKLREQIKERDEATNKSNIQPSRRKLAWVVRQLKTPEEVRLLRAVYGKQFVLVSIYSSPQRREDFLISKIKIKSRGTIDNNTSSEGAQRLIERDSKEDNEYGQNLSGTFCLGDIFVDSNNKESAIVSIDRFLNAFFGSNEISPTRDEYGMYLAKTASLRSCDLSRQVGAAIFSKTGEIISLGSNEVPKAGGGTYWTGDNADSRDIRLGHDPNEINKVEIFAEIISRLLEDKLLSNDLLNKDAASIVTILLSKNEGKRYKDLRVMDIIEFGRIIHAEMSAICDAARNGRAIIGATLFCTTFPCHLCAKHIVASGIGRIVYLEPYPKSYAKKLHSDSIQVEDHSDSEKVSFEPFIGISPSRYRELFEGGRRKDPFGEALKWKNDPRKPVIDVVVPPHFEAEKLVIAQLGKLIVSGTG

SEQ ID NO: 111 - protein, 330 aa, synthetic construct
  REGION 1..330: note = pYY-BEM4.2; tr|A0A2D6EXD2|A0A2D6EXD2_9ARCH polypeptide sequence
MIIGLVGTIGAGKQTIIDYLQEKYGYNALSCSDVLREILKKQGKPVTRDNLREIGNKTREEGGNGAIAKILLEKLRNNWKANYIVDSLRHPDEVSVLRTSPLFHLVAVDADLRIRFERVKARKREEEPTTLPAFVERDQKEMFGTGNEQRIRETMELADELVLNNGTVEELKQRIDDLNLVSDERLRPSWDDYFMRLARLAAQRSNCMSRKVGAIITKDRRVIATGYNGTPRGVKNCNEGGCERCNSAVAKGTAISECLCLHGEENAIIEAGRVRSEGATIYTSFLPCLWCTKMIIQAGLKEVVFSEVYDLHEASIKLFETSGVLIRRLK

SEQ ID NO: 112 - protein, 367 aa, synthetic construct
  REGION 1..367: note = pYY-BEM4.3; tr|F7YVM7|F7YVM7_9THEM polypeptide sequence
MNEFKYMSLALKLAKKGKYTTSPNPMVGAVIVKDGKILATGYHKKAGQPHAEINALSKLNFQAQNCEMYVTLEPCSHYGRTPPCADAIIRSGIRKVVIATLDPNPLVNGKGVEKLKNAGIEVVCGVLEEKAKKLNEKFFKYITTKIPFVALKIAQTLDGKIALKNGESKWITSEKSREYVHKLRMEYDAVLTGIGTILKDDPQLNVRLKKVYKQPLRIILDSKLKIPLSAKVLEDPSKVIILTTALADKEKLEELRSKGVEVIITNEKNGIVDLESALKILGEKKITSVMVEAGPTLLTSFLKESLFDKIYLFIAPKIFGADSKSVFSELGLEDISKSQKFSLESVKKIGEDLLLELYPKQLKKLEE

SEQ ID NO: 113 - protein, 449 aa, synthetic construct
  REGION 1..449: note = pYY-BEM4.4; tr|A0A3M6UNF1|A0A3M6UNF1_9CNID polypeptide sequence
MEEKSELENELMRSTSPKPSVPNGSKGNECEQRETRITKENLYMVLALWMEEFPVVEQTSSAKRLNKVGVVFVLPTDRVLAADCSRDGVHGVARVMVNHCGKLEGCKVFVSRKPCSLCAKLLVQSKVSRVFYLPIEPESENKGEIARADNLFKNSSVGQSVFVPCVEQKVLDKLEDKLPKEIITPDDISECRDNLLKKCGWSAEWFARAQASLPWPCFEGKMKSQVDNDFKSLIKWIAVVKAPMDKGVAFPKVKLTSDSRVVPDCDADNFPDSKTAYHMMIFAKMLARQTDDPKTGVGAVIVRGKVPDIVSLGWNGFPSKALYGEFPRASDDDRALQKKFPYVIHAEQNALMVRNVKDLTDGILFVTKPPCDECAPMIKLSGVKTIVIGEKIEKSRGGELSYNLIKEYIKEGIMTCYQMEATKTKAKRLASDPETRKRLKSSCSNSNDV

SEQ ID NO: 114 - protein, 414 aa, synthetic construct
  REGION 1..414: note = pYY-BEM4.5; tr|A0A2G3K826|A0A2G3K826_9BURK polypeptide sequence
MTKIIDDVNTAAAAVLDQATAAANQTTFAVGGVMVNNQTGEVISAIHNNVIIPLSNNVSFTFDPTAHGERQLVYWYYANKEALKLPEPNQITVITSLDPCAMCTGALLTAGFNVGVVAIDTYAGINCAQNFQFATLPANLRTKAQKNFGYYASGAANFKPLTRSYVGGPSVAFKNGVVTPANLRDCGTVFTQSVDTVRNTSNSTGLAPSQMSNPAELPSNSAILQAYRAIYKKAFTIKIDNPRLPDAQILTELKAVLADAPNARNAVAFIDPFGNLVLCMADAFNTSPVHAAFMNVTQEYAKTRWDLMNKYAQASTTDNPALYLTHPKYGTFVYLYAPDPDDSITIMSLGAYGSTMEGPIPNMFPSNLQFYYPPRNGAQFSELVPVVNELPPFYTQNVNISLMQVPGVTQAPTK

SEQ ID NO: 115 - protein, 308 aa, synthetic construct
  REGION 1..308: note = pYY-BEM4.6; tr|K1ZCJ4|K1ZCJ4_9BACT polypeptide sequence
MSSRAKKNRSTNLKKSIGQKSIENKPTDQKKDQVLVAYVPVIHEGYRRFFRHFPAVKELWLISQELSHELRSLQKDIRALKASETKKLLQTWGQFQKIKLLTPSSLAILQKTTTQLVFPDEEISHHLVEKYFAQNRVLFASFFLRWDKKSSLKKHDLQEYSEISNKEFDQMMIAIAQQEADKSDDWWRQVGGLIFKDETILLLAHNQHTPTEAEAYFAGDPRADFHQGEYLKISTAIHAEAYLIAQAAKQGISLEGADLYVTTFPCPVCAKQVAYSGIKRVFFREGYSLLDGETILKANGVKLIRVTV

SEQ ID NO: 116 - protein, 615 aa, synthetic construct
  REGION 1..615: note = pYY-BEM4.7; tr|A0A1G3PNQ8|A0A1G3PNQ8_9SPIR polypeptide sequence
MRDLPLLVLGLTGPMGAGCTRFARDISKMEPGKVIKKQGLLDQVAHEISELSKKASEIRLQCISNGKNSELAELKRLNRRLNAKLAERACLHVIAKSSLPEPLFISLNTIVIKIAVDSITAPEFAEWAKNHAKVADLLKWLRTQWESELTLYETWGQDAGRFSQDELEKMDAMFAEFERIGDEILKEDFETYFGKRNNDFSIRMFSENIRLSGNPFRPAENGGGGGKYDEPSMVMIARETDRYIRFYRTRSDQKRSHFFIIDEIKNPREAEYFRARHQNFFLVSIFSSSEIRASRMRRGLGHDAGVSDADFQHLFRELDSRDWGADDFDAHGLHRQNIYRCFNLADIAINNDVEDERFSEVLFNKFIRYYALMLSPGCVQPTPQETYMHLAYSLSLRSTCISRQVGAVITDLEDRILSLGWNEVPEGQIGCGLKVKKDYTDKENPLFEMEIWDNVITAEDLAVWDDEDSICVKDILSRIEIKTKLKSVSLTPEERADVLKALRIKRLEYSRSLHAEENAILQVASRGGVGLKDGTIYVTTFPCELCSKKIYQVGISKIYYTEPYPNSISEKVILKDGIRNIKILQFEGVKSYSYFKLFKPGFDKKDAQMLEGRGI

SEQ ID NO: 117 - protein, 291 aa, synthetic construct
  REGION 1..291: note = pYY-BEM4.8; tr|A0A1G0PGF4|A0A1G0PGF4_9BACT polypeptide sequence
MKHNNQLRKEIEKLLGQNSIIKNDELKKLQKEYKIETDELLISFLPYAAEFAKVPISKYKVGAVVLGKSGNIYFGSNMEFEAGALSATVHAEQSAVNNAWLNGETGINKIAVTAAPCGYCRQFLNELTTAKQLHVLLKDKNLEAAKVFKLTELLPEAFGPRDLEIEGGLMKVENHKLKIENINDELINAALEAANKSYAPYSKNYSGVSIQLSDGTIFSGRYSENAAYNPSLLPFQSALAFMNMNTKKGSNNKIVDAVLVEAVSNISQKDAAGTLLNSISKTKLRYYKIKN

SEQ ID NO: 118 - protein, 398 aa, synthetic construct
  REGION 1..398: note = pYY-BEM4.9; tr|A0A0P4WGY5|A0A0P4WGY5_9EUCA polypeptide sequence
MEENSSATSQPKCASRTKQGGNDLSTDMSNLSVGETKRTDFLPWDDYFMAVAFLSAMRSKDPSSQVGACIVNADKKIVGIGYNGMPIGCSDDELPWNKESLDPLQTKYMYVCHAEMNAIMNKNSSDLAGCCVYVALFPCNECAKLVIQAGIREVVFFSDKHQQKPETVASKKMLNMAGVAYRQYTPSQSKIELNLSLKEQEKSEPTADITQSSERDQNSKRKDYLSWEEYFMAMAHLSALRSKDPITQVGACIVNSKKKIVGIGYNGMPLGCNDDLMPWGNSSSNKLETKYMYVCHAGVNAIMNKNSCDVSGCTLYVALFPCNECAKVIIQAGIKTIIYASDTNKDQASILASKKMLDMAGIKYRADNLSQRKIVIDFKTIDWNSRFMNDHQNDPTCL

SEQ ID NO: 119 - protein, 259 aa, synthetic construct
  REGION 1..259: note = pYY-BEM4.10; tr|A0A3D8IG27|A0A3D8IG27_9HELI polypeptide sequence
MRKNILYFILTLFFLSGLYATSLPEDNVVSGVIYEKIDTVSAEVDHIYPMLALAIVYKDWQEKNMLNKQGHNIGLVIVDENNMPVFWVRNSVHATHNGTQHGEVRLVSNLLNCEGFNKYLDKYTLYTTLEPCIMCAGMLSMVQIPKVVYAQKDLSCGNTQEIISTAKYPRYYKAFTVENGYKKDLEECFEQYKICKNDSITDFLVNDSAKEIFRKASNDLQDYKVKFKENRRVIKVAQEFLQNIQTKDNLDVLQCPKNM

SEQ ID NO: 120 - protein, 256 aa, synthetic construct
  REGION 1..256: note = pYY-BEM4.11; tr|A0A351C8C4|A0A351C8C4_9BACT polypeptide sequence
MNELTKQSEHLRNEALRIATRSYVPYTGQQEGVIILLENGDLIPGVRVENASFQLTIPALQNALSTMYALQRTDISMIVSSIPFTDSDLAYTGGMAEIAWEMVGASLLLVAGAHIPEAGTFIDPARGENLLDVSREAALNAFIPESDFPVGSAIQTSDDVVIDGCNVEHSDWSKIICAERNVLSTARSYGLGQITTIYVSCPKEPGGTPCGACRQVIVELAPDATVWMDRGNQEPIAMKATKLLPGHFTGNVLKKQ

SEQ ID NO: 121 - protein, 301 aa, synthetic construct
  REGION 1..301: note = pYY-BEM4.12; tr|A0A1G6V2K7|A0A1G6V2K7_PEPNI polypeptide sequence
MPIVRVNEIGARLPEDWEALETAIWQAYVSREDLPDAGELDLTLVDDATIQELNKTHRQLDKSTDVLSFPMYDDRDDLAADVQAGLPVILGDIMISVPTAERQAQAYGHSFKREMAYLLVHGLLHIAGYDHMSAEEKSAMRRAEEAILADVDVPRDTAPSKTAAVLDEADVQALIDAARAARLQAYAPYSGYAVGAALLAADGRRFCGVNVENASYGATCCAERTALFAAVTAGARDFIALALVTEGDEPAPPCGLCRQALAEFSPDLAIYLAGPTGETYRRTSLAALFPEAFSLSTKESV

SEQ ID NO: 122 - protein, 528 aa, synthetic construct
  REGION 1..528: note = pYY-BEM4.13; tr|F2NP91|F2NP91_MARHT polypeptide sequence
MPVMETHALEARFKEALARLCPEGRLLAAVSGGGDSVALLYLLKAAGRDTIVAHLDHALRPDSAADAAFVEKLAQRLGFPLETEHVDVRALAHRKRINLEAAAREVRYAFLARVARRWKARCILTAHTLDDNAETVLLQILRGAGRGLGIRPLQRRVARPLLEFSRAELRAYLEARGARWLEDPTNRSLELDRNYLRHAVLPRITARFPHALEALARFSQAQQADDWALEALSARHLIPDRRWPVPAYRALPLERAPEALRRRAIRGVLEALGVRPEARLVADVEAALGGRAQTLPGGVVVRRQRGTLFFIPPTVRFPKVQPPAGLEARPPRPGDYLVFPYGRKRLVDFLNERGVPRELKRRWPVGAVGAEVRWVYGLWPEPDEDRYMRRALVLARAAARQGEVPIGAVLVRDGAVLAEAANAVEASRDATAHAELLALRTALRRVGEKVLPGATLYVTLEPCPMCYGAILEARVARVVYGVENLKAGAFTVHGLEPRVALEAGRVEGECAKVLKDFFARLRPGRDGA

SEQ ID NO: 123 - protein, 226 aa, synthetic construct
  REGION 1..226: note = pYY-BEM4.14; tr|A0A316TX77|A0A316TX77_9BACT polypeptide sequence
MINGYTPYSGNQNTCYVKGESGTFYPGVRIENVSYPLTISSVQAAVCSCLANSDNPVEYYTGDHQPELLQVWADEYDMKPGGKLPDSPLKLFDPLVPSIPDIKKELDVLTEKSVTPNSGFPVSALLQTEKGYIRGVNIELSSWALGLCAERVAISRALTAGYTQFKSIHIYAPEADFVSPCGACRQVLLEVMPDADTELYHGDGTLSKHIVSDLLPFGFTSHKLKK

SEQ ID NO: 124 - protein, 321 aa, synthetic construct
  REGION 1..321: note = pYY-BEM4.15; tr|R6VYG3|R6VYG3_9FIRM polypeptide sequence
MIHKGTQTIETKRLILRAFTPDDAEAAFENWMSDPKVTEFLRWKTHADISDSRKIVNEWANGSADPEFYQWAIVPKDVNEPIGTISVVDRNDALGIFHIGYCIGSKWWHKGITSEAFSAVIHFLFEEVGANRIESQHDPENIHSGDVMKKCGLTFEGTLRQADFNNRGIVDACVYSILQSEWQNNTSVWQRLYNAALTVQNDRVVSPFIDAGGVAAALMTKKGNIYTGICIDTASTLGMCAERNAVANMLTNGESRIDKIVAVMPDGKVGAPCGACREYMMQLDRDSGDIEILLDLETEKTVRLKDLIPDWWGAERFGDTE

SEQ ID NO: 125 - protein, 229 aa, synthetic construct
  REGION 1..229: note = pYY-BEM4.16; tr|A0A3C1HZ18|A0A3C1HZ18_9BACI polypeptide sequence
MGDIMENWNELSEPWKRCFLQAWKAYCHGSIPIGAVLVDSEGEIFLEGRNRVHELTAPEGQLCDCRIAHAEMNVLVQVKTSDYEKLSGATIYSTMEPCIQCFGAIILSRIKNISFAAIDDKLAGATTLEDRHGFIKSRNLNIAGPFSHLGEIQIILRTDFLLRIFDSEYADPLIAAHEKDYPIGVALGRHYHRNNRLQVAKKETIPFGELFNEFSFDIKRAREGYTLGK

SEQ ID NO: 126 - protein, 205 aa, synthetic construct
  REGION 1..205: note = pYY-BEM4.17; tr|A0A1M6KV24|A0A1M6KV24_9BACT polypeptide sequence
MEASQQNILLKIEGKGPVAEINFTVTLPEWLVEQVQSGSTVFLTQKEKMRFVLELARKNVAQETGGPFAAAVFSLESGELVSAGVNVVVESRCSSAHAEVVALSLAQKAVDSHDLGAAGLPRMVLVSSAEPCAMCMGAIPWSGVKQVICGARDEDVRSVGFDEGAKPLEWVEDFAERGIEVIRDVLREEATEVLWDYRERGGEIY

SEQ ID NO: 127 - protein, 207 aa, synthetic construct
  REGION 1..207: note = pYY-BEM4.18; tr|A0A2U0T9B4|A0A2U0T9B4_9RHIZ polypeptide sequence
METAELISRLLDVIEKDIAPVTAKGVARGNKLFGAAILKKSDLAVIVAETNNEIENPLWHGEMQAIKRFFELPADQRPATRDCLFLATHEPCSLCLSGITWSGFDNFYYLFSHQDSRDGFAIPYDIQILKSVYAVPEPETGTVSPARDLYNRSNDFWTSHGLQDMIAGLARSNREALLARIDDLNALYAELSERYQRDKGGKGIPLP

SEQ ID NO: 128 - protein, 231 aa, synthetic construct
  REGION 1..231: note = pYY-BEM4.19; tr|A0A2K9PN08|A0A2K9PN08_9FLAO polypeptide sequence
MSDKKESKIKISKTSESIELDEIHSLLSYSIVQKFWENDDRNGRGYNVGVILVDENKNIVDWDINSVNKTENSTQHGEMRLISRYLDKDELYSLKGYTMYPTLEPCAMCAGMMTMTNVYRTVNGQMDYFYSKALERLSIDTRECGGYPPYPRTVISEISPSSISTRLDAEYKQYTNAGNKPIITKFLSTYKAKTIYDDAFNQFINFKCKFPENKTKYENAIKFYNSLPESI

SEQ ID NO: 129 - protein, 330 aa, synthetic construct
  REGION 1..330: note = pYY-BEM4.20; tr|F4PWM7|F4PWM7_CAVFA polypeptide sequence
MRFSLSLLFVILSVLLAGVLACKDPYNPETVDYGQCASATKANYEVRSDSKVLTPADLPADELAVHESRMRHIIDIARVNNKKFVSSIYFPNGTLACIGINTGKPNMIAHGEIVAIQNCTEIHGISMYTNYSIYTTGEPCSMCASAILWSRFKTVVWSTYNSDLYCKICMSNIPIDSSYIFSRAYGLGIEAPVAIGGVVKAEGDAWFGTYCNRPTSIYYIAPKCACQDPAKVSPLKFTQTRTTVWVEGGDKVVTQWNAIISNPSNSTIVDPPIVISPSVVFKGAPWGISAASEPNTYKLSYNKVLFPGQTFSFGYSVYGLEEVAFTALEA

SEQ ID NO: 130 - protein, 193 aa, synthetic construct
  REGION 1..193: note = pYY-BEM4.21; tr|U7QZM1|U7QZM1_PHOTE polypeptide sequence
MNKTRRKLLATLGIMSISMSFIAQAGEKKTQVINNILSKQEITEHEKYMREAIKEAIKNPKHPFGAVIVNRNNGEILSRGVNTGRNNPILHGEIQAINHYITQYGNQGWENVALYTTGEPCSMCMSALVWIGIREVIWATSISVIRNSGIRQIDISAHEIAERASSFYNPITLVGGILANETDKLFLERKRGN

SEQ ID NO: 131 - protein, 319 aa, synthetic construct
  REGION 1..319: note = pYY-BEM4.22; tr|A0A081CH48|A0A081CH48_PSEA2 polypeptide sequence
MASRRHLLATQVTGNHRKLSLWHLRGWLSPYTKLVDAVYFLTTNSFYHSLQTPPVQSITMLLSSIITSLALAAQASAYREGLHPEFQSGLSINSVPATDRDHWMRLANSAIYYPPVSHPCPQAPFGTAIVNTTSNELICAIANRVGSTGDPTQHGEITAIQHCTNVMRKKGLSPQEIIAAWKQLSLYTNAEPCTMCLSAIRWAGFKEVIYGTSVGTISENGRNQIYIPSNLVLEKSYSFGHATLMLGNILTHETDPFFQHQFNESAPCPVGCERTQVGEARVKTCEPVPNWQKLVRLEYSEDSRVGSEPVAHTPLHLEL

SEQ ID NO: 132 - protein, 203 aa, synthetic construct
  REGION 1..203: note = pYY-BEM4.23; tr|A0A3D3HMU1|A0A3D3HMU1_9GAMM polypeptide sequence
MDYSDAILGAITSIRRNSKQPGVNVTDNVTDSSTQYNNDEYWMRRALALAREAGEAGEIPVGAVLVKDNQQVAGGFNQPIRSHDPAAHAEILTLREAGAVLGNYRLIDTTLYVTLEPCMMCAGALVHSRIKRLVFGAAEPKTGAAGSFIDLLTLPRLNHYMEVTGGVLGEECSVLLSDFFRRRRAEKKALKRQNSESGSDSAS

SEQ ID NO: 133 - protein, 270 aa, synthetic construct
  REGION 1..270: note = pYY-BEM4.24; tr|A0A1N5WT13|A0A1N5WT13_9ACTN polypeptide sequence
MLEKIERRLVAAAEAVVRSPSTGDAHTVAAAAMDANGDIYSGVNVFHFTGGPCAELVVIGSAAAANAPPLITIVAVGDGDRGVIAPCGRCRQVMLDLHPDVFVIVPTGDGQLAAKPVRELLPFGYVARTGSTAPRVVYFHPRHYDTISSGLKTATVRFQDSVQTGPAVFVFDDGESIRRLDAVVEKVESRRLDHLTEEDAHHEALPDSDALRDAIKTQYPMLGDGDVVDVATFRLTAISAPDPDPRSSYPPAVSRCNPAGPRADLLVGQS

SEQ ID NO: 134 - protein, 257 aa, synthetic construct
  REGION 1..257: note = pYY-BEM4.25; tr|X0SAC5|X0SAC5_9ZZZZ polypeptide sequence
MTKDGRVIASAHDTEVTDQDSTAHAEINAIRKASKIYRKDLTGCLIISTHEPCPMCTGSIIWSNISKVVYGVSIRDSIKAGRDMINLSCKEIIKKPNAEINIYDGILKKECLKLYNNDTRKLVKKFRKYEWINIEENLLNKRMQWFENNKTMIRKLKGNDLEKAYHLILMKIGIKRSEAPIVKKSESKIIFHSKNYCPSLEACIILDLDTREVCKEIYERPTEELIRRLNSKLRFTRNYDCIRPYSDYCEEIIILEK

SEQ ID NO: 135 - protein, 154 aa, synthetic construct
  REGION 1..154: note = pYY-BEM4.26; tr|A0A3B8IC10|A0A3B8IC10_9BACT polypeptide sequence
MPSHEDFIHQCLELGKEALLQGNPPVGSVIVWQDQVIGRGIENGRSSGDITQHAELLALQEAVATGQRDKLKEAIIYSTHEPCVMCAYPIRQYKIPTVVYSVAVPELGGHTSSWHLLTTEDVPKWGKAPKIITGISAEEVEALNAAFQDSLKKG

SEQ ID NO: 136 - protein, 180 aa, synthetic construct
  REGION 1..180: note = pYY-BEM4.27; tr|A0A2N9P8B9|A0A2N9P8B9_9FLAO polypeptide sequence
MFIFKLISPPVSIEVYQDKIIQKLYICFMENIFTDEYFMKKALQEAETAFQQGEIPVGAVIVIDNRIIARSHNLTEMLNDVTAHAEMQAITASANFLGGKYLKDCTLYVTLEPCQMCAGALYWSQISKIVYGATDEQRGYRAMGAQLHPKTKVISGIMQNECTHLMKDFFKQRRSKSTKD

SEQ ID NO: 137 - protein, 178 aa, synthetic construct
  REGION 1..178: note = pYY-BEM4.28; tr|K1KX30|K1KX30_9BACT polypeptide sequence
MVKNPVNNNELYFGKHSEIPMNEEQKAYMKMAVDLSRSGMESGKGGPFGCVIVKDGKVIGIGSNSVLETNDPTAHAEIVAIRDACRNLGHFQLDGCEVYTSCEPCPMCLGAIYWARPSKVFFANDKRDAAEAGFDDDFIYQELELPYEKRKIPFEQGMQDTAKEVFQEWILKEDKTLY

SEQ ID NO: 138 - protein, 196 aa, synthetic construct
  REGION 1..196: note = pYY-BEM4.29; tr|R4XI84|R4XI84_TAPDE polypeptide sequence
MSSEIEPPSTDVHKHAVAEAADESGAADAFMQIALQQAETALLNKEVPVGCVFVHQPTGTVLATGANQTNASLNGTLHAEFVAIESILRDHPPSIFRESDLYVTVEPCVMCASALRQLQVRKVYFGCGNDRFGGCGSVFSIHSDASKTGDAAYMVESGIFRKEAIMLLRRFYLLQNESAPKPALKSTRVLKEHFDE

SEQ ID NO: 139 - protein, 212 aa, synthetic construct
  REGION 1..212: note = pYY-BEM4.30; tr|A0A239CVF7|A0A239CVF7_9DELT polypeptide sequence
MSPASKKHFPSLFSFLLLTIGLICGTAHAQPQGHTADDTAATLANASLKEHEPFIRRCYQLAIDAGKKGNHPFGALLVHKGKIVLEAENTVLTDNDFTNHAEMNLIAEAARTLSRQIIPEATVYTSCAPCAMCTATLAMAGFTRIVYGVSHDALNKRFGLKGKSVSCPALFKTMGMELEFVGPVLEKEGLRVFDFWPEKDPHAQMLKKQARK

SEQ ID NO: 140 - protein, 320 aa, synthetic construct
  REGION 1..320: note = pYY-BEM4.31; tr|A0A1Q3NME1|A0A1Q3NME1_9BACT polypeptide sequence
MTEFNYDWAKLAFSSKRPLTNLKATFIIAPREISEKRFTQLLKEYLPKGDILLGISKEDYVEGLEGQPQFAMLQQKTLQKLIDKVNDASAHKVYTLRYFQRELPAIIEKLTPPRVVGIHGSWHHSFHTLPIYYLLSEKRIPYQLVAAFSDEDEARAYEVATDKKIVRPTLEGSFDDTTVLQLTDEVAKSSYDYGFQTGAILAEKVNGVYQPVAAGFNKVVPYQTYALLNGASRETNFSPANDMNHYDTIHAEMQILVEAAKQGISLKDKTLFVNLMPCPSCARTLSQTELSEIVYRIDHSGGYAVDLLTKVGKDIRRIVY

SEQ ID NO: 141 - protein, 180 aa, synthetic construct
  REGION 1..180: note = pYY-BEM4.32; tr|A0A2G6N4N7|A0A2G6N4N7_9DELT polypeptide sequence
MKERTVSYSDRHFMAEALEMAESALTQGEFPVGCVIADGTAVVARGHRTGTTAGAVNEIDHAEINALRHLGLAGEHLDRTDLTIYSTMEPCLMCFAAIVLSGINRIVYAYEDVMGGGTGCDLTGLPPLYRDAPLTLVAGVRRRASLNLFRRFFTDPENGYWAGSLLSRYTLNQTKDSHRL

SEQ ID NO: 142 - protein, 156 aa, synthetic construct
  REGION 1..156: note = pYY-BEM4.33; tr|A0A0G0RBB8|A0A0G0RBB8_9BACT polypeptide sequence
MQSVQYNKLTHLQRRALDEAEQVLENSYNPYSHFYVGACLISEDEQLIAGTNFENAAYGSAICAERAAVLRANAMSIRRFRGIAIIARGEDFNTTEVTGPCGSCRQVLYEISQVSGCDLQVILATSKKDKIVITTIRELLPLAFGPLDLGVDIGKY

SEQ ID NO: 143 - protein, 217 aa, synthetic construct
  REGION 1..217: note = pYY-BEM4.34; tr|A0A327L2Q5|A0A327L2Q5_9RHIZ polypeptide sequence
MVTSRDGEDEAMMARCVALSRIAVGKGEYPFGAVVAREGRIVAEAINRTIRDGDVSRHAEVIALARAQKAIGRRELRECSLYSNVEPCAMCSYCIREAWVGRVVYALGSPVMGGVSKWNILRDDGLSGRMPQVFDAAPEVVSGVLVEQAQAAWRDWSPLAWEMITLRGLMTDPSARPECRTRAARPRSLWHHLVALIERPPRPYVDPTSAAEGHADL

SEQ ID NO: 144 - protein, 162 aa, synthetic construct
  REGION 1..162: note = pYY-BEM4.35; tr|S2DR30|S2DR30_9BACT polypeptide sequence
MKMKKKIEITVSLEVIQKSEWSKEDRSLIERAIHAVEHAHAPYSNFMVGTALLLDNGQIFSANNQENVSFPVGICAERAVLSYAMGNFPNNRPVKLAVVAKRRSDSTWATVTPCGLCRQTINEYEVKFGHPIEILMLNPGEEILKASGIDQLLPFRFNDLNS

SEQ ID NO: 145 - protein, 153 aa, synthetic construct
  REGION 1..153: note = pYY-BEM4.36; tr|A0A369QGF1|A0A369QGF1_9BACT polypeptide sequence
MEEHEKWMHWCLNLAQQALQQGDFPVGAVVVQKGKLIGQGVEAGQLKKDITCHAEMEAIRDARQTINTADLQNCILYSTHEPCIMCSYVIRHHKISRVVVGTTVPEVGGSSSAYPLLSAPDISIWVAPPHLVTGVLAEACQALSQAYKQKFKK

SEQ ID NO: 146 - protein, 159 aa, synthetic construct
  REGION 1..159: note = pYY-BEM4.37; tr|A0A1W6X4U4|A0A1W6X4U4_9RHIZ polypeptide sequence
MTNPSRQERWDRRFLELAKVFGTWSKDRSAGTGCVIVGPDRLLRASGYNGFARGIDDEVPERHERPAKYSWTEHAERNAIYNAAKLGISLDGCTAYVNWFPCIDCARAIVQAGIVRLVGLHPDHADQRWGSEFKFATEMLRESGIEIILYDIPELAARK

SEQ ID NO: 147 - protein, 490 aa, synthetic construct
  REGION 1..490: note = pYY-BEM4.38; tr|A0A238BW09|A0A238BW09_9BILA polypeptide sequence
MEEMARKIRTKAKKANSYCNTMTFLISKASIVLLKAECKRIELTVVIFRFLIKMNASEPNNELCDMTVIKSMLKITHVIFDLDGLLIDTEVVFSKVNQCLLSKYNKKFTPHLRGLVTGMPKKAAVTYILEHEKLSAKVDVDEYCKKYDEMAEEMLPKCSLMPGVMKLVRHLKTHSIPMAICTGATKKEFEIKTRYHKELLDLISLRVLSGDDPAVKRGKPAPDPFLVTMDRFKQKPEKAENVLVFEDAANGVCAAIAAGMNVIMVPDLTYMKIPEGLQNKINSFSDNLIISNDLNVALMSLKKELSEEEVHFLNRAFEIAVDAVLNNEVPVGCVFVFEGQEVAFGRNDVNRTKNPTYHAEMVALKMMKQWCMDNGRDLEEIMRRTTLYVTLEPCIMCASALYHLRLKKILYGAANERFGGLVSVGTREKYGAKHFIEIMPNLSVDRAVKLLKEFYEKQNPFCPEEKRKVKKPKKSGNNNDNSDDAVALNV

SEQ ID NO: 148 - protein, 159 aa, synthetic construct
  REGION 1..159: note = pYY-BEM4.39; tr|A0A1J5H6Z0|A0A1J5H6Z0_9BACT polypeptide sequence
MAYQPSEKFMQMAIDKTREGVLSGQTPFGACIVKDGKVVACEHNTVWQDTDITSHGEVHTIRAACKAIGSIDLSGCILYSTCEPCPMCFSAIHWARIDTVVYGAFIADAQDAGFNELTISNEKMKEFGGSPVNFISGFMRDENVALFKLWKEQGANNVY

SEQ ID NO: 149 - protein, 168 aa, synthetic construct
  REGION 1..168: note = pYY-BEM4.40; tr|A0A3C2D945|A0A3C2D945_9BACT polypeptide sequence
MKTTEIRIIVHEYQNIDELTENDQYLLHEARRITEFAYAPYSGFHVGAAILLGNGMIVKGNNQENSAYPSGLCAERVALFYANANYPDSEVKTIAISAAKNGILVNDPIKPCGGCRQTLSEAEVRFGSPIRIILDGQDSILVLHGVESLLPLSFSKKDLASPLAATGR

SEQ ID NO: 150 - protein, 214 aa, synthetic construct
  REGION 1..214: note = pYY-BEM4.41; tr|A0A1I7EYS3|A0A1I7EYS3_9BURK polypeptide sequence
MKFKLDPSRPPDEDDYYLGVALAVRRKANCTGNRVAAVIVKNKRVIATGYNGVPEDMPNCLDGGCLRCSNPGGQFKSGTRYDLCICVHAEQNALLTAARFGISVEGAHLYTTMQPCFGCAKEILQAKIEKVFYLHPWVPTDVDPVMDAAMKAEYAKIIGKLKVKKLDFDDPVATWAVTTMRQAALASDKNPDKKTPPKTAKKKVAKKKSRTSPR

SEQ ID NO: 151 - protein, 155 aa, synthetic construct
  REGION 1..155: note = pYY-BEM4.42; tr|H8GQX8|H8GQX8_METAL polypeptide sequence
MNHEHFMRRAIELARQAPQYPFGAVIVRRDDGQCVGQGFNRSDLNPTYHGEMVAINDCAVRHCAEDWRGFDLYTTAEPCAMCQGAIEWAGIGRVFYGTSIPYLQKLGWWQIDLRAAEVSARAVFRDTLIVGGILETECNALFAAARRGCFGTGSE

SEQ ID NO: 152 - protein, 156 aa, synthetic construct
  REGION 1..156: note = pYY-BEM4.43; tr|A0A0S8HZN3|A0A0S8HZN3_9CHLR polypeptide sequence
MDEHDIRFLRASFDVARNARKNGNHPFGALLVDEHGRIVMEAENTVITAKDCTGHAETNLMREASSKYDSDFLANCTIYTSTEPCPMCAGAIFWSNVRRVVYGLSEESLYEIAGRGSEEVLFLSCREIFERGKKLIEVIGPLLEDEAREVHMGFWR

SEQ ID NO: 153 - protein, 193 aa, synthetic construct
  REGION 1..193: note = pYY-BEM4.44; tr|E3SF31|E3SF31_9CAUD polypeptide sequence
MKPTTVLQIAYLVSQESKCCSWKVGAVIEKNGRIISTGYNGSPAGGVNCCEHAEEQGWLLNKPKPVLIPGHKSECVRFSQVDRFVLAKAHREAHSAWSKNNEIHAELNAILFAARMGSSIEGATMYVTLSPCPDCAKAISQSGIKKLVYCETYDKNIPGWDDILKNAGIEVFNVPKRSLDKLNWENINEFCGE

SEQ ID NO: 154 - protein, 330 aa, synthetic construct
  REGION 1..330: note = pYY-BEM4.45; tr|F8AAC6|F8AAC6_THEID polypeptide sequence
MIRAPWHEYFMLLAKIVALRSGCNSRPSGAVIVKNKRILATGYNGPMPGAWHCTDRGPGYCFRREKGIPDIDKYNFCRATHAEANAIAQAARFGISVEGASLYCTLAPCYVCLKLIASAGIKKVYYEHDYGSRDFERDQFWKEAIKEAGLEKFEQITVSQEVMEQLQEILPYPTSKRRLAPTEFLDEFEDGKKYGVPSIEVLFNKLNYLTRQALKDITFVIEKTTVTEEPEGISFYLSGKMVELSELINTVKKQINADQNFYFLAKHNAIEAKIEILREAENIRLKAFLNECPLESFKRIAESLDYILYQVSNSLSLPTRLELSVNLLRI

SEQ ID NO: 155 - protein, 158 aa, synthetic construct
  REGION 1..158: note = pYY-BEM4.46; tr|A0A2H4ZNK4|A0A2H4ZNK4_9EUKA polypeptide sequence
MKKQLSRKIQEEWMSRLLRNAYDAGTYGEVPIAAVILNESGQCIGWGRNCREKDQNPLGHAEIIALRQASYLKKSWRFNECTMLVTLEPCPMCAGALLQARINHIIYGASDYKRGGFGGVLDLSKNSSAHHKIEITRGVKSIQSCQLLETWFRRRRRV

SEQ ID NO: 156 - protein, 176 aa, synthetic construct
  REGION 1..176: note = pYY-BEM4.47; tr|A0A239N5N1|A0A239N5N1_9PSED polypeptide sequence
MEGRAGIIPFDEGGAAMGPAEEDSPMQHLAYMREALALARANVEAGGRPFGAVLVRDGEVIARAANGTHLDHDPTAHAELLALRAAGRALGSPRLDGCVVYASGHPCPMCLAAMHLSGVSAAYYAYSNADGEPYGLSTAAVYAQMAQPVEWQSLPLQALRPEDEEGLYGFWRERRP

SEQ ID NO: 157 - protein, 199 aa, synthetic construct
  REGION 1..199: note = pYY-BEM4.48; tr|A0A328VTR2|A0A328VTR2_9PSED polypeptide sequence
MHPEHLALLQQAPASTHADDTWARLCCEQALLAVEEGCYAVGALLVDGAGELLCSGRNQVFAPAYASAAHAEMRVLDQLEAEHAQVDRRSLTLYVSLEPCLMCYGRILLAGITRVRYLARDRDGGFALRHGRLPPAWANLASGLSVVQAKADPYWLDLAEHAIGRLQDRQTLRQRVIRAWRGQRTLTDEFSSTKRTHSG

SEQ ID NO: 158 - protein, 402 aa, synthetic construct
  REGION 1..402: note = pYY-BEM4.49; tr|A0A103YG48|A0A103YG48_CYNCS polypeptide sequence
YIRELHASSLRRDEHEIQNPKILVIVDRLSSPSLHVSLSLSLSLVIFPPFIPLNQTPTHMENAKVVEAKDGTIAVASAFSGHQEVVQDRDHKFLTRAVEEAYKGVECGDGGPFGAVVVHKDEVVASCHNMVLKHTDPTAHAEVTAIREACKKLNKIELSDCEIYASCEPCPMCFGAIHLSRIKRLIYGAKAEAAIAIGFDDFIADALRGTGFYQKAHLEIKQADGNGAMIAEQVFEKTKAKFAIDHKFLTRAVEEAYKGVECGDGRPFGALVVHKDEVVVSCHNMVLNYTDPTAHAEITAIREACKKLNRIELSDCEMYSSCEPCPMCFGAIQISRIKRLVYGAKAEASIASGIPIGDFISDALKGTGFHEKANFEIKQADGNGAMIAEQVFERTKAMFPKR

SEQ ID NO: 159 - protein, 195 aa, synthetic construct
  REGION 1..195: note = pYY-BEM4.50; tr|W5M1M8|W5M1M8_LEPOC polypeptide sequence
NSSTRESRVMAQMEINGGASPPKKPGKGQSAADQDMITGLINKALQAKEFAYCPYSNFRVGAALMTNDGRVFTGCNVENACYNLGVCAERTAILKAVSEGYESFRAIAVSSDLQDQFISPCGACRQVMREFGTGWDVFLTKVDGSYVRMTVDELLPMSFGPDDLKKKKVFSLQNGHEVSTQFYTHSPCEAGENNN

SEQ ID NO: 160 - protein, 134 aa, synthetic construct
  REGION 1..134: note = pYY-BEM4.51; tr|A0A3N5YPZ2|A0A3N5YPZ2_9ALTE polypeptide sequence
MSNSETEHIQALVDAAQAAQKQSYSPYSSFQVGAAIFADDGNTYSGCNIENVAYPLGQCAEATAIGMMIMQGAKRIEDIMIASPNDQVCPPCGGCRQKISEFGTAETKIHMVTRSGEVSTVTLGELLPLAFDSL

SEQ ID NO: 161 - protein, 162 aa, synthetic construct
  REGION 1..162: note = pYY-BEM4.52; tr|A0A2A9NC86|A0A2A9NC86_9AGAR polypeptide sequence
MTNSTLSNEDRTRLIQGAFQARKKTYSPYSNFPVGAALLTTDGRIIEGANIENASYGGTICAERTAIVKAVSDGYRHFAGIAVTTKMPTRVSPCGICRQVLREFCSLDMPVLLVPGDYPQRNPVDDDGADKPGVITEGGVRETTLGALLPDSFGPENLPPRA

SEQ ID NO: 162 - protein, 163 aa, synthetic construct
  REGION 1..163: note = pYY-BEM4.53; tr|A0A2D6RD43|A0A2D6RD43_9GAMM polypeptide sequence
MNIENLITENDETLIRRCIELAGESVKNGDKPFGALLAKDGNIIFESSNNAKTKVPYHAEILTLMDAQDKLNTTDLSDYALYSNCEPCPMCSFMIREYKLDKVVFSVHSPYMGGQSRWNILEDDVLTRFKPYFSKPPNVVGGVLESEGKRIFDKVGLWMFGKE

SEQ ID NO: 163 - protein, 204 aa, synthetic construct
  REGION 1..204: note = pYY-BEM4.54; tr|A0A0H3AVL6|A0A0H3AVL6_BRUO2 polypeptide sequence
MHAKGYSQQERRIIPFANRFRFRELCSNKSLHGLRAKFPEQYTKWDPMRKAASITKANSATPMDIALEEAHAAGERGEVPIGAVIVRDGEIIARAGNRTREFNDVTAHAEILTIRQAGEMLGSERLIDCDLYVTLEPCAMCAAAISFARIRRLYYGASDPKGGGIEHGGRFYTQPTCHHAPEIYPGFCEADARKILKDFFREKR

SEQ ID NO: 164 - protein, 165 aa, synthetic construct
  REGION 1..165: note = pYY-BEM4.55; tr|A0A242H531|A0A242H531_9ENTE polypeptide sequence
MFIVKNNIEVIQQQAELDAKFMKQALKLAKDASNNGNEPFGAVLVKNDKVILTGENQIHTESDPTYHAELGIIRDFCTSQKITDLSEYTLYTSCEPCCMCAGAMVWSNLDRMVYGLGHDELAEIAGFNIMIGSEEIFSKSPNRPEVAKGVLKEAAVPVYVDYFQR

SEQ ID NO: 165 - protein, 181 aa, synthetic construct
  REGION 1..181: note = pYY-BEM4.56; tr|A0A2R6XZE2|A0A2R6XZE2_9BACL polypeptide sequence
MSGRISWHEYFMAQAKLIALRATCTRLMVGAVIVRDRRVIAGGYNGSIAGDEHCIDVGCKVRDGHCIRTIHAEQNALMQCAKFGVSTDGAELYVTHFPCLNCTKLLIQAGIRHIYYEVPYRVDPYAIELLEKAGVGTTQITVDLNAYVQVMSKVSTDPALTYVPESKAQKDEYGQSVGKIV

SEQ ID NO: 166 - protein, 173 aa, synthetic construct
  REGION 1..173: note = pYY-BEM4.57; tr|A0A139SHT6|A0A139SHT6_9BACT polypeptide sequence
MSEANASSESLPSRNSPVELIAEAAGKFGRRPTWDEYFMATAVLISTRSSCERLNVGCVIVTAGESHKNRIVAAGYNGHLPGSPHTSRMRDGHEQATVHAEQNAISDAARRGSSVEGCTAYVTHYPCINCAKILASAGIAKICYRLDYHNDPLVKPMLAEAGIEIVQLGEAAS

SEQ ID NO: 167 - protein, 170 aa, synthetic construct
  REGION 1..170: note = pYY-BEM4.58; tr|A0A261DBH2|A0A261DBH2_9RICK polypeptide sequence
MVMKKKLITVKRSTEFNNFFMEEALKQAQFALDKNEIPVGAIIVNRITNKVIAKAHNIVEQTKNPVLHAEIVAINQSCQILSSKNLSDCDMYVTLEPCVMCSGAISFARIGRLFYAANDPKQGAIENGGRFFNSKSCFYRPEIYSGFSAKISENLIKEFFYNVRYQKCNP

SEQ ID NO: 168 - protein, 146 aa, synthetic construct
  REGION 1..146: note = pYY-BEM4.59; tr|A0A2N0XZK6|A0A2N0XZK6_9VIBR polypeptide sequence
MTDNSLHESYMRQAFELSKSALPGCRPNPPVGCVFVKDGEVVSSGFSQPPGNHHAEAGAIAAYTGSYDGLVAYVTLEPCSFQGRTPSCAKALVRVRPEKVYVAILDPDTRNSGAGIKILEDAGIDVEVGLLGEEVASFLNPYLIRN

SEQ ID NO: 169 - protein, 159 aa, synthetic construct
  REGION 1..159: note = pYY-BEM4.60; tr|A0A1V5R0F9|A0A1V5R0F9_9BACT polypeptide sequence
MTKKETTKLHALDDFCMKKALLLAKRAFRADEVPVGALVVDSSNKVIGRGYNQVEKRKSQRAHAEQLAIEQACKKIGDWRLEGCTLYVTLEPCTMCMGLIKLSRIERVVFGAASPLFGYQLDKNRKSQLYKKGVIKIRKGVGKATAAALLKDFFKNKRM

SEQ ID NO: 170 - protein, 167 aa, synthetic construct
  REGION 1..167: note = pYY-BEM4.61; tr|A0A2W0H8Y3|A0A2W0H8Y3_9BACI polypeptide sequence
MKNNGRLDHEYFMTEALQEAKEAGQRGDLPIGAVIVHNGRIIARGSNMRKTAGIKISHAENNAMHNCAPYLMKHASECVIYTTLEPCIMCLTTLVMANIDSIVFAADDKYMNMKPFIDANSYIRDRIHQYKGGVCRGESEALLRKYSPYAAELALNGTHPHHRKGGA

SEQ ID NO: 171 - protein, 165 aa, synthetic construct
  REGION 1..165: note = pYY-BEM4.62; tr|A0A261BDB7|A0A261BDB7_CAERE polypeptide sequence
LYKLYIFRMTTTKANLTQFEQELVDKAVGAMEKAYCKYSGFKVGAALVCEDGEIIIGANHENASYGATICAERSAMVTALTKGHRKFKLLAVATELEAPCSPCGICRQYLIEFGDYKVILGSSTSDQIIETTTYGLLPYAFTPKSLDDHEKEAEERNHQEGEKKH

SEQ ID NO: 172 - protein, 162 aa, synthetic construct
  REGION 1..162: note = pYY-BEM4.63; tr|A0A2E1PHI6|A0A2E1PHI6_9GAMM polypeptide sequence
MKELLIHSWLMLNSNSKLIMERVIELSEINLKNGKIPIAAVIVDKKNYEIISESQNEDSPIGHAELLAITKALKKLNTNRLDSTNLFVTIEPCPMCAYAISKCHINRLYFGSEDEKGGGVINGPRIFESHNLKKIDYVSHCYHEKTTQLMQSFFQLKRNQQL

SEQ ID NO: 173 - protein, 133 aa, synthetic construct
  REGION 1..133: note = pYY-BEM4.64; tr|A0A378LUA7|A0A378LUA7_9GAMM polypeptide sequence
MDTIIKKMISNAHNTLAHSYSPYSKFSVASCICTDKDNFYTGVNVENSAYGLAICAETSAISAMVTAGEKRIKSMVVMAGTNILCSPCGACRQRIYEFSTPDTLIHLCDKNSILRTFKINELLPEAFKFDFNP

SEQ ID NO: 174 - protein, 370 aa, synthetic construct
  REGION 1..370: note = pYY-BEM4.65; tr|A0A139HQ78|A0A139HQ78_9PEZI polypeptide sequence
MADSLKSKPGHARHDTALIHGLSQSDVQKLSESCVDAKSKAYCPYSHFRVGCAVLLANGDVVQGANVENAAYPVGTCAERVALGTAVGAKKGDFRALAVSTDISPPASPCGMCRQFIREFCELNTPILMYDKDGKSVVMTLEQLLPMSFGPDKLLPPGQLENGLMQTQTQSSFVTRAFSTTSSRRQDDTPQVPQSHYDFFPQTFPQGPPPKTSFSPDLKQLRKEFLQLQAKAHPDLAPQDQKRRAEALSMRINEAYKTLQSPLRRAQYLLSQQGIDVEDETAKLDDSSLLMEVMEAREAVEEVEDEEQLNEIRAENNGRIEESVRVLEDAFRDNEFEKAAQEAIRLRYWVNIEESIQGWEKGNGGGILHH

SEQ ID NO: 175 - protein, 165 aa, synthetic construct
  REGION 1..165: note = pYY-BEM4.66; tr|A0A2A9FXV0|A0A2A9FXV0_9VIBR polypeptide sequence
MCNLKENKDMDKYFHFACDATIEGMREGTGGPFGATLTRNGEVVCSVANTVLKDMDISGHAEMVAVREACKKLDTLDLSDCVMYATCEPCPMCVSVMLWAGIKTCYYASTHLDAAKHGFSDQQLRDYLDGSDTSTLNMVHIEDNRDDCAKIWTEFRHLNETKNDG

SEQ ID NO: 176 - protein, 509 aa, synthetic construct
  REGION 1..509: note = pYY-BEM4.67; tr|A0A1A8AG96|A0A1A8AG96_NOTFU polypeptide sequence
MEHSDRWSRAEPGLSTSSRETRDGSTQTDCKLQGHGPRLSKVNLFTLLSLWMELFPQEQDEENGQSQIRRSGLVVVREGKVVGLHCSGADLHAGQAAILQHGASLANCQLFFSRRPCATCLKMIINAGVRQITFWPGDPEISMLTSNQTHSQRTSQSITEASLDATAVEKLKSNSRPQICVLMQPLAPGVLQFVDETSRRSDFMERMMDDDPELDSEKLFNSDRLRHLKDFCRHFLIQTDQRHKDILSQMGLKNFCVEPYFSNLRSNMTELVEVLAAVAAGMPQQHYGFYREESLSLDPHPVDVSQAVARHCIVQARLLSYRTEDPKVGVGAVIWAKGQSACCCGTGRLYLIGCGYNAYPAGSKYAEYPQMDNKQEDRERRKYRYIVHAEQNALTFRTRDIKPDECSMLFVTKCPCDECIPLIRGAGVKHIYTSDQDRDKDKGDISYLRFGSLKGVCKFIWQRSPPVSSASSLHLTNGCVGKHVRQAEQQIYKNKKLCTKGSSGSSDIC

SEQ ID NO: 177 - protein, 148 aa, synthetic construct
  REGION 1..148: note = pYY-BEM4.68; tr|A0A3E2VN88|A0A3E2VN88_9FIRM polypeptide sequence
MEKEITNMDKQKLIQMAVDGLGRSYAPYSHFHVSAALLCADGTVYTGNNIENAAYTPSVCAERCAIFKAVGDGRREFEAIAVCGGPDGVIEDYCPPCGVCRQVMREFCDPSSFRVLVAKTAEDYREYTLEQLLPDGFGPDHLTGSGER

SEQ ID NO: 178 - protein, 221 aa, synthetic construct
  REGION 1..221: note = pYY-BEM4.69; tr|A0A2D5ZRJ2|A0A2D5ZRJ2_9BACT polypeptide sequence
MARPVHLHTGERRTEEGATESRAVAAVATAITRAPRAPPRPATGRERDGPPPRRVFGGGLRVGDPSGYDRGESKPIGGPLTEKRSDWHSYFMRIAGEVATRATCDRKHVGAVIVRNRTILSTGYNGSIRGMPHCDDVGHDMVDGHCIATIHAEANAILQAARNGVMIQDGSIYITASPCWNCFKLVANAGLKRVYYGEFYRDKRSFEVARRLGIDLMHIEV

SEQ ID NO: 179 - protein, 155 aa, synthetic construct
  REGION 1..155: note = pYY-BEM4.70; tr|A0A1B8WPS3|A0A1B8WPS3_9BACI polypeptide sequence
MEGVQLIYQFQWGNLIMTVNKEDLYLIDVARNTIKTLYVDGKHHVGAAVRTKTGKIYSAVHLEANIGRVSVCAEAIALGKAISEGESEFDTIVAVRHPDPTQENQKIEVVSPCGICRELISDYGKGTNVILKNKEGYIKTVISDLLPNKYIREDN

SEQ ID NO: 180 - protein, 156 aa, synthetic construct
  REGION 1..156: note = pYY-BEM4.71; tr|A0A1W5ZQK9|A0A1W5ZQK9_9BACI polypeptide sequence
MNRFMERAVSLAAENVRVGGQPFGAVLVKDDELVAEGVNEMHLNYDVSGHAELLAIRRAQGELQTHDLSGYTMYASGEPCPMCLSAMYFAGIKDVFYCATVEEAAQVGLEKSKNVYDDLQKSKGERSLVMKQMPLEDDQEDPMKLWDERTNHNGTS

SEQ ID NO: 181 - protein, 340 aa, synthetic construct
  REGION 1..340: note = pYY-BEM4.72; tr|A0A378V0W4|A0A378V0W4_MYCFO polypeptide sequence
MVHAQFDPTARQALAATAVEAKTRKDLTWQQIADAAELSPAFVTAAVLGQHALPARSAEAVAALLGLDDDAALLLQTIPIRGSIPGGIPTDPTIYRFYEMLQVYGTTLKALVHEQFGDGIISAINFKLDVRKVADPEGGERAVITLDGKYLPPNPFDRVRYRGGLMDFAQRTIDIARQNVAEGGRPFATVIVKNGEILAESPNLVAQTHDPTAHAEILAIRKACTRIGTEHLIGATIYVLAQPCPMCLGSLYYCSPDEVVFLTTRDAYEPHYVDDRKYFELNMFYDEFAKPWDQRRLPMRYEPRDAAVDVYKLWQERNGGERRVPGAPTSTRPGKNPRGE

SEQ ID NO: 182 - protein, 157 aa, synthetic construct
  REGION 1..157: note = pYY-BEM4.73; tr|I3XF03|I3XF03_RHIFR polypeptide sequence
MKQRCMSPKSAQRFWDNDMHNNKDRPMSENELFVAAREAMAKAHAPYSKFPVGAAIRAEDGQIYTGANIENLSFPEGWCAETTAISHMVMAGQRKIMEVAVIAEKLALCPPCGGCRQRLAEFSGASTRIYLCDETGIKKSLALSDLLPHSFETEILG

SEQ ID NO: 183 - protein, 595 aa, synthetic construct
  REGION 1..595: note = pYY-BEM4.74; tr|F8IEF3|F8IEF3_ALIAT polypeptide sequence
MDAKELETRGWLCMRAVDVIDKKRRGEALAEEELRFLIEGYVAGRIPDYQMSAFLMAVVWRGMTREETLVLTRLLADSGERLDLSGIPGVKVDKHSTGGVGDKATLVVLPLVASIGVPVIKMSGRGLGHTGGTIDKLESIPGFRTDLSVAELVAQVRQVGIALGGQTADLAPADKKLYALRDVTGTVESLPLIASSVMSKKLAGGADAIVLDVKVGDGAFMKSRSDARRLARLMVEIGEAAGRRTVAVLSNMDQPLGCAIGNALEVAEAIRVLSGEGPFDLAEIALALAEEMTVLAGVAATREEARRMLRQSVAEGRALETLRRWIAAQGGDPAVVDDPSRLPQAPVQMPYLPKKAGFVAKLSALAFGLAAMRLGAGRETKEEAIDPSVGIVLHAKVGDRVQTHRPMFTVHARTGEDALRCIQELEAAIQISDDPVEAPPLILARIDRSEALPYADLMDAAREARDRAYVPYSGFAVGAALELADGRMVTGANVENASYGLTNCAERSAVFRAVAEGGPGTKPEIRAVAVIADSPEPVSPCGACRQVLAEFCSPDTPVYLGNLQGDVRETTVGALLPGAFTDAQMANVRRQDKEA

SEQ ID NO: 184 - protein, 153 aa, synthetic construct
  REGION 1..153: note = pYY-BEM4.75; tr|A0A1G3M638|A0A1G3M638_9SPIR polypeptide sequence
MKTTNINALDKWDLRFLQMAEHVAEWSKDPSTKVGAVIVRPDRTIASVGFNGFARGVRDTVERLWNRELKYPLTVHAELNAILSAHEPVRGHSLYVSPLSPCSNCAGVIIQSGIARVVAKCGQVNNPAQWSESFNLALTAFAEAGVSVILVEH

SEQ ID NO: 185 - protein, 177 aa, synthetic construct
  REGION 1..177: note = pYY-BEM4.76; tr|A0A3D9LFR2|A0A3D9LFR2_9MICC polypeptide sequence
MEQNDHGSSGAFSDPFEDDIPLTASLPRITGTGSGIDWQRLESTARAAMTRAYVPYSRFPVGAAALVEDGRVVAGCNIENASLGLTLCAECSLVSNLQMSGGGRIVAFYCVDGNGEVLMPCGRCRQLLYEFHAPGMRLMGPDGELTMDEVLPLAFGPADMTHLSDSAASTDDPGRTR

SEQ ID NO: 186 - protein, 172 aa, synthetic construct
  REGION 1..172: note = pYY-BEM4.77; tr|A0A3B9YGB5|A0A3B9YGB5_9BACT polypeptide sequence
MAKPISKKYRKLIETAKAARKKAYSPYSRYQVGAAVLTESGRIYSGANMENASYGLCMCAERVAIANAVTRGEKVLQAVCVVGKKARPCGACRQVMLEFSTKETELLMVDIDPNARRDTVIRTRVYSMLPNPFDPFESGMLPQHPQNLLRRRKSPQPRRKRRSRPVHREVSR

SEQ ID NO: 187 - protein, 391 aa, synthetic construct
  REGION 1..391: note = pYY-BEM4.78; tr|A0A182F569|A0A182F569_ANOAL polypeptide sequence
MPRPSQFRVSSSQSLSNSQIQASQSSDSVVDITSYVNAVVKALLNLSCTKTIIKRADLVNIALKGNGRLIGRVLQDANIELKEIYGYELIEVEKSKTMILCSTLAAGSMDELNDANRRRYTFLYLILGYIFMKNGSVPETIVWEFLETLGIEEQQEHNYFGDVRKLYDSLFKQAYLTRTKQALEGLNDDVMLISWGVRSKHEVSKKDILAGFCKVMNRDPVDFKAQYIEANEKDDKMNNNINGTVDGRNTVEYSSLDASVKELIEAAIKVRNNAYCPYSNFAVGAALRTVGGDIVTGCNVENGTFGPSVCAERTAVCKAVSEGHREFTAVAVVAFQETEFTAPCGTCRQTLSEFSRKDIPIYLVKPSPVRVMVTSLFQLLPHAFSPSFLNK

SEQ ID NO: 188 - protein, 151 aa, synthetic construct
  REGION 1..151: note = pYY-BEM4.79; tr|A0A264Z0D4|A0A264Z0D4_9BACI polypeptide sequence
MEPKKLIEEAIVASKQAYVQYSNFHVGAALLTKDGKLYHGCNIENASYGLTNCAERTAIFKAVSEGEKEFQAIAVVGDTEGPISPCGACRQVLAEFFSPDTVVILANLKGDHVVTNINELLPGFFSSKDLQKKVKNCFEKNALGSSCLRPI

SEQ ID NO: 189 - protein, 229 aa, synthetic construct
  REGION 1..229: note = pYY-BEM4.80; tr|A0A1L9Q1R3|A0A1L9Q1R3_ASPVE polypeptide sequence
MPLSAEEAALVETATATINSIPLSEDYSVASAAKASDGRVFTGVNVYHFTGGPCAELVVLGVAAAAGAAQLTHIVAVANEQRGILSPCGRCRQVLLDLQPNIQVIVGKEGSEQSVPVAQLLPFSYRQPDQHTPVIFKALTSSGPVVVDFFATWCGPCKAVAPVVGKLSETYTDVRFIQVDVDKARSISQEHDIRAMPTFVLYKDGKLLDKRVVGGNMKELEEQIKAIIA

SEQ ID NO: 190 - protein, 18 aa, synthetic construct
  REGION 1..18: note = synthetic peptide
KRTADGSEFESPKKKRKV

SEQ ID NO: 191 - protein, 16 aa, synthetic construct
  REGION 1..16: note = synthetic peptide
KRPAATKKAGQAKKKK

SEQ ID NO: 192 - protein, 17 aa, synthetic construct
  REGION 1..17: note = synthetic peptide
KKTELQTTNAENKTKKL

SEQ ID NO: 193 - protein, 19 aa, synthetic construct
  REGION 1..19: note = synthetic peptide
KRGINDRNFWRGENGRKTR

SEQ ID NO: 194 - protein, 16 aa, synthetic construct
  REGION 1..16: note = synthetic peptide
RKSGKIAAIVVKRPRK

SEQ ID NO: 195 - protein, 7 aa, synthetic construct
  REGION 1..7: note = synthetic peptide
PKKKRKV

SEQ ID NO: 196 - protein, 30 aa, synthetic construct
  REGION 1..30: note = synthetic polypeptide
MDSLLMNRRKFLYQFKNVRWAKGRRETYLC

SEQ ID NO: 197 - protein, 1368 aa, Streptococcus pyogenes [sequence omitted]

SEQ ID NO: 198 - DNA, 4104 bp, Streptococcus pyogenes
  misc_feature 1..4104: note = wild type spCas9 polynucleotide sequence
  source 1..4104: mol_type = genomic DNA
atggataagaaatactcaataggcttagatatcggcacaaatagcgtcggatgggcggtgatcactgatgattataaggttccgtctaaaaagttcaaggttctgggaaatacagaccgccacagtatcaaaaaaaatcttataggggctcttttatttggcagtggagagacagcggaagcgactcgtctcaaacggacagctcgtagaaggtatacacgtcggaagaatcgtatttgttatctacaggagattttttcaaatgagatggcgaaagtagatgatagtttctttcatcgacttgaagagtcttttttggtggaagaagacaagaagcatgaacgtcatcctatttttggaaatatagtagatgaagttgcttatcatgagaaatatccaactatctatcatctgcgaaaaaaattggcagattctactgataaagcggatttgcgcttaatctatttggccttagcgcatatgattaagtttcgtggtcattttttgattgagggagatttaaatcctgataatagtgatgtggacaaactatttatccagttggtacaaatctacaatcaattatttgaagaaaaccctattaacgcaagtagagtagatgctaaagcgattctttctgcacgattgagtaaatcaagacgattagaaaatctcattgctcagctccccggtgagaagagaaatggcttgtttgggaatctcattgctttgtcattgggattgacccctaattttaaatcaaattttgatttggcagaagatgctaaattacagctttcaaaagatacttacgatgatgatttagataatttattggcgcaaattggagatcaatatgctgatttgtttttggcagctaagaatttatcagatgctattttactttcagatatcctaagagtaaatagtgaaataactaaggctcccctatcagcttcaatgattaagcgctacgatgaacatcatcaagacttgactcttttaaaagctttagttcgacaacaacttccagaaaagtataaagaaatcttttttgatcaatcaaaaaacggatatgcaggttatattgatgggggagctagccaagaagaattttataaatttatcaaaccaattttagaaaaaatggatggtactgaggaattattggtgaaactaaatcgtgaagatttgctgcgcaagcaacggacctttgacaacggctctattccccatcaaattcacttgggtgagctgcatgctattttgagaagacaagaagacttttatccatttttaaaagacaatcgtgagaagattgaaaaaatcttgacttttcgaattccttattatgttggtccattggcgcgtggcaatagtcgttttgcatggatgactcggaagtctgaagaaacaattaccccatggaattttgaagaagttgtcgataaaggtgcttcagctcaatcatttattgaacgcatgacaaactttgataaaaatcttccaaatgaaaaagtactaccaaaacatagtttgctttatgagtattttacggtttataacgaattgacaaaggtcaaatatgttactgagggaatgcgaaaaccagcatttctttcaggtgaacagaagaaagccattgttgatttactcttcaaaacaaatcgaaaagtaaccgttaagcaattaaaagaagattatttcaaaaaaatagaatgttttgatagtgttgaaatttcaggagttgaagatagatttaatgcttcattaggcgcctaccatgatttgctaaaaattattaaagataaagattttttggataatgaagaaaatgaagatatcttagaggatattgttttaacattgaccttatttgaagatagggggatgattgaggaaagacttaaaacatatgctcacctctttgatgataaggtgatgaaacagcttaaacgtcgccgttatactggttggggacgtttgtctcgaaaattgattaatggtattagggataagcaatctggcaaaacaatattagattttttgaaatcagatggttttgccaatcgcaattttatgcagctgatccatgatgatagtttgacatttaaagaagatattcaaaaagcacaggtgtctggacaaggccatagtttacatgaacagattgctaacttagctggcagtcctgctattaaaaaaggtattttacagactgtaaaaattgttgatgaactggtcaaagtaatggggcataagccagaaaatatcgttattgaaatggcacgtgaaaatcagacaactcaaaagggccagaaaaattcgcgagagcgtatgaaacgaatcgaagaaggtatcaaagaattaggaagtcagattcttaaagagcatcctgttgaaaatactcaattgcaaaatgaaaagctctatctctattatctacaaaatggaagagacatgtatgtggaccaagaattagatattaatcgtttaagtgattatgatgtcgatcacattgttccacaaagtttcattaaagacgattcaatagacaataaggtactaacgcgttctgataaaaatcgtggtaaatcggataacgttccaagtgaagaagtagtcaaaaagatgaaaaactattggagacaacttctaaacgccaagttaatcactcaacgtaagtttgataatttaacgaaagctgaacgtggaggtttgagtgaacttgataaagctggttttatcaaacgccaattggttgaaactcgccaaatcactaagcatgtggcacaaattttggatagtcgcatgaatactaaatacgatgaaaatgataaacttattcgagaggttaaagtgattaccttaaaatctaaattagtttctgacttccgaaaagatttccaattctataaagtacgtgagattaacaattaccatcatgcccatgatgcgtatctaaatgccgtcgttggaactgctttgattaagaaatatccaaaacttgaatcggagtttgtctatggtgattataaagtttatgatgttcgtaaaatgattgctaagtctgagcaagaaataggcaaagcaaccgcaaaatatttcttttactctaatatcatgaacttcttcaaaacagaaattacacttgcaaatggagagattcgcaaacgccctctaatcgaaactaatggggaaactggagaaattgtctgggataaagggcgagattttgccacagtgcgcaaagtattgtccatgccccaagtcaatattgtcaagaaaacagaagtacagacaggcggattctccaaggagtcaattttaccaaaaagaaattcggacaagcttattgctcgtaaaaaagactgggatccaaaaaaatatggtggttttgatagtccaacggtagcttattcagtcctagtggttgctaaggtggaaaaagggaaatcgaagaagttaaaatccgttaaagagttactagggatcacaattatggaaagaagttcctttgaaaaaaatccgattgactttttagaagctaaaggatataaggaagttaaaaaagacttaatcattaaactacctaaatatagtctttttgagttagaaaacggtcgtaaacggatgctggctagtgccggagaattacaaaaaggaaatgagctggctctgccaagcaaatatgtgaattttttatatttagctagtcattatgaaaagttgaagggtagtccagaagataacgaacaaaaacaattgtttgtggagcagcataagcattatttagatgagattattgagcaaatcagtgaattttctaagcgtgttattttagcagatgccaatttagataaagttcttagtgcatataacaaacatagagacaaaccaatacgtgaacaagcagaaaatattattcatttatttacgttgacgaatcttggagctcccgctgcttttaaatattttgatacaacaattgatcgtaaacgatatacgtctacaaaagaagttttagatgccactcttatccatcaatccatcactggtctttatgaaacacgcattgatttgagtcagctaggaggtgactga

SEQ ID NO: 199 - protein, 1367 aa, Streptococcus pyogenes
  REGION 1..1367: note = MISC_FEATURE - spCas9 polypeptide sequence
MDKKYSIGLDIGTNSVGWAVITDDYKVPSKKFKVLGNTDRHSIKKNLIGALLFGSGETAEATRLKRTARRRYTRRKNRICYLQEIFSNEMAKVDDSFFHRLEESFLVEEDKKHERHPIFGNIVDEVAYHEKYPTIYHLRKKLADSTDKADLRLIYLALAHMIKFRGHFLIEGDLNPDNSDVDKLFIQLVQIYNQLFEENPINASRVDAKAILSARLSKSRRLENLIAQLPGEKRNGLFGNLIALSLGLTPNFKSNFDLAEDAKLQLSKDTYDDDLDNLLAQIGDQYADLFLAAKNLSDAILLSDILRVNSEITKAPLSASMIKRYDEHHQDLTLLKALVRQQLPEKYKEIFFDQSKNGYAGYIDGGASQEEFYKFIKPILEKMDGTEELLVKLNREDLLRKQRTFDNGSIPHQIHLGELHAILRRQEDFYPFLKDNREKIEKILTFRIPYYVGPLARGNSRFAWMTRKSEETITPWNFEEVVDKGASAQSFIERMTNFDKNLPNEKVLPKHSLLYEYFTVYNELTKVKYVTEGMRKPAFLSGEQKKAIVDLLFKTNRKVTVKQLKEDYFKKIECFDSVEISGVEDRFNASLGAYHDLLKIIKDKDFLDNEENEDILEDIVLTLTLFEDRGMIEERLKTYAHLFDDKVMKQLKRRRYTGWGRLSRKLINGIRDKQSGKTILDFLKSDGFANRNFMQLIHDDSLTFKEDIQKAQVSGQGHSLHEQIANLAGSPAIKKGILQTVKIVDELVKVMGHKPENIVIEMARENQTTQKGQKNSRERMKRIEEGIKELGSQILKEHPVENTQLQNEKLYLYYLQNGRDMYVDQELDINRLSDYDVDHIVPQSFIKDDSIDNKVLTRSDKNRGKSDNVPSEEVVKKMKNYWRQLLNAKLITQRKFDNLTKAERGGLSELDKAGFIKRQLVETRQITKHVAQILDSRMNTKYDENDKLIREVKVITLKSKLVSDFRKDFQFYKVREINNYHHAHDAYLNAVVGTALIKKYPKLESEFVYGDYKVYDVRKMIAKSEQEIGKATAKYFFYSNIMNFFKTEITLANGEIRKRPLIETNGETGEIVWDKGRDFATVRKVLSMPQVNIVKKTEVQTGGFSKESILPKRNSDKLIARKKDWDPKKYGGFDSPTVAYSVLVVAKVEKGKSKKLKSVKELLGITIMERSSFEKNPIDFLEAKGYKEVKKDLIIKLPKYSLFELENGRKRMLASAGELQKGNELALPSKYVNFLYLASHYEKLKGSPEDNEQKQLFVEQHKHYLDEIIEQISEFSKRVILADANLDKVLSAYNKHRDKPIREQAENIIHLFTLTNLGAPAAFKYFDTTIDRKRYTSTKEVLDATLIHQSITGLYETRIDLSQLGGD

SEQ ID NO: 200 - DNA, 4212 bp, synthetic construct
  misc_feature 1..4212: note = wild-type Cas9 polynucleotide sequence
  misc_feature 5..58: note = RuvC domain
  misc_feature 718..764: note = RuvC domain
  misc_feature 772..901: note = HNH domain
  misc_feature 906..1101: note = RuvC domain
  source 1..4212: mol_type = other DNA
atggataaaaagtattctattggtttagacatcggcactaattccgttggatgggctgtcataaccgatgaatacaaagtaccttcaaagaaatttaaggtgttggggaacacagaccgtcattcgattaaaaagaatcttatcggtgccctcctattcgatagtggcgaaacggcagaggcgactcgcctgaaacgaaccgctcggagaaggtatacacgtcgcaagaaccgaatatgttacttacaagaaatttttagcaatgagatggccaaagttgacgattctttctttcaccgtttggaagagtccttccttgtcgaagaggacaagaaacatgaacggcaccccatctttggaaacatagtagatgaggtggcatatcatgaaaagtacccaacgatttatcacctcagaaaaaagctagttgactcaactgataaagcggacctgaggttaatctacttggctcttgcccatatgataaagttccgtgggcactttctcattgagggtgatctaaatccggacaactcggatgtcgacaaactgttcatccagttagtacaaacctataatcagttgtttgaagagaaccctataaatgcaagtggcgtggatgcgaaggctattcttagcgcccgcctctctaaatcccgacggctagaaaacctgatcgcacaattacccggagagaagaaaaatgggttgttcggtaaccttatagcgctctcactaggcctgacaccaaattttaagtcgaacttcgacttagctgaagatgccaaattgcagcttagtaaggacacgtacgatgacgatctcgacaatctactggcacaaattggagatcagtatgcggacttatttttggctgccaaaaaccttagcgatgcaatcctcctatctgacatactgagagttaatactgagattaccaaggcgccgttatccgcttcaatgatcaaaaggtacgatgaacatcaccaagacttgacacttctcaaggccctagtccgtcagcaactgcctgagaaatataaggaaatattctttgatcagtcgaaaaacgggtacgcaggttatattgacggcggagcgagtcaagaggaattctacaagtttatcaaacccatattagagaagatggatgggacggaagagttgcttgtaaaactcaatcgcgaagatctactgcgaaagcagcggactttcgacaacggtagcattccacatcaaatccacttaggcgaattgcatgctatacttagaaggcaggaggatttttatccgttcctcaaagacaatcgtgaaaagattgagaaaatcctaacctttcgcataccttactatgtgggacccctggcccgagggaactctcggttcgcatggatgacaagaaagtccgaagaaacgattactccatggaattttgaggaagttgtcgataaaggtgcgtcagctcaatcgttcatcgagaggatgaccaactttgacaagaatttaccgaacgaaaaagtattgcctaagcacagtttactttacgagtatttcacagtgtacaatgaactcacgaaagttaagtatgtcactgagggcatgcgtaaacccgcctttctaagcggagaacagaagaaagcaatagtagatctgttattcaagaccaaccgcaaagtgacagttaagcaattgaaagaggactactttaagaaaattgaatgcttcgattctgtcgagatctccggggtagaagatcgatttaatgcgtcacttggtacgtatcatgacctcctaaagataattaaagataaggacttcctggataacgaagagaatgaagatatcttagaagatatagtgttgactcttaccctctttgaagatcgggaaatgattgaggaaagactaaaaacatacgctcacctgttcgacgataaggttatgaaacagttaaagaggcgtcgctatacgggctggggacgattgtcgcggaaacttatcaacgggataagagacaagcaaagtggtaaaactattctcgattttctaaagagcgacggcttcgccaataggaactttatgcagctgatccatgatgactctttaaccttcaaagaggatatacaaaaggcacaggtttccggacaaggggactcattgcacgaacatattgcgaatcttgctggttcgccagccatcaaaaagggcatactccagacagtcaaagtagtggatgagctagttaaggtcatgggacgtcacaaaccggaaaacattgtaatcgagatggcacgcgaaaatcaaacgactcagaaggggcaaaaaaacagtcgagagcggatgaagagaatagaagagggtattaaagaactgggcagccagatcttaaaggagcatcctgtggaaaatacccaattgcagaacgagaaactttacctctattacctacaaaatggaagggacatgtatgttgatcaggaactggacataaaccgtttatctgattacgacgtcgatcacattgtaccccaatcctttttgaaggacgattcaatcgacaataaagtgcttacacgctcggataagaaccgagggaaaagtgacaatgttccaagcgaggaagtcgtaaagaaaatgaagaactattggcggcagctcctaaatgcgaaactgataacgcaaagaaagttcgataacttaactaaagctgagaggggtggcttgtctgaacttgacaaggccggatttattaaacgtcagctcgtggaaacccgccaaatcacaaagcatgttgcacagatactagattcccgaatgaatacgaaatacgacgagaacgataagctgattcgggaagtcaaagtaatcactttaaagtcaaaattggtgtcggacttcagaaaggattttcaattctataaagttagggagataaataactaccaccatgcgcacgacgcttatcttaatgccgtcgtagggaccgcactcattaagaaatacccgaagctagaaagtgagtttgtgtatggtgattacaaagtttatgacgtccgtaagatgatcgcgaaaagcgaacaggagataggcaaggctacagccaaatacttcttttattctaacattatgaatttctttaagacggaaatcactctggcaaacggagagatacgcaaacgacctttaattgaaaccaatggggagacaggtgaaatcgtatgggataagggccgggacttcgcgacggtgagaaaagttttgtccatgccccaagtcaacatagtaaagaaaactgaggtgcagaccggagggttttcaaaggaatcgattcttccaaaaaggaatagtgataagctcatcgctcgtaaaaaggactgggacccgaaaaagtacggtggcttcgatagccctacagttgcctattctgtcctagtagtggcaaaagttgagaagggaaaatccaagaaactgaagtcagtcaaagaattattggggataacgattatggagcgctcgtcttttgaaaagaaccccatcgacttccttgaggcgaaaggttacaaggaagtaaaaaaggatctcataattaaactaccaaagtatagtctgtttgagttagaaaatggccgaaaacggatgttggctagcgccggagagcttcaaaaggggaacgaactcgcactaccgtctaaatacgtgaatttcctgtatttagcgtcccattacgagaagttgaaaggttcacctgaagataacgaacagaagcaactttttgttgagcagcacaaacattatctcgacgaaatcatagagcaaatttcggaattcagtaagagagtcatcctagctgatgccaatctggacaaagtattaagcgcatacaacaagcacagggataaacccatacgtgagcaggcggaaaatattatccatttgtttactcttaccaacctcggcgctccagccgcattcaagtattttgacacaacgatagatcgcaaacgatacacttctaccaaggaggtgctagacgcgacactgattcaccaatccatcacgggattatatgaaactcggatagatttgtcacagcttgggggtgacggatcccccaagaagaagaggaaagtctcgagcgactacaaagaccatgacggtgattataaagatcatgacatcgattacaaggatgacgatgacaaggctgcagga

SEQ ID NO: 201 - protein, 1368 aa, synthetic construct
  REGION 1..1368: note = exemplary catalytically active Cas9 nickase (nCas9) polypeptide sequence
MDKKYSIGLAIGTNSVGWAVITDEYKVPSKKFKVLGNTDRHSIKKNLIGALLFDSGETAEATRLKRTARRRYTRRKNRICYLQEIFSNEMAKVDDSFFHRLEESFLVEEDKKHERHPIFGNIVDEVAYHEKYPTIYHLRKKLVDSTDKADLRLIYLALAHMIKFRGHFLIEGDLNPDNSDVDKLFIQLVQTYNQLFEENPINASGVDAKAILSARLSKSRRLENLIAQLPGEKKNGLFGNLIALSLGLTPNFKSNFDLAEDAKLQLSKDTYDDDLDNLLAQIGDQYADLFLAAKNLSDAILLSDILRVNTEITKAPLSASMIKRYDEHHQDLTLLKALVRQQLPEKYKEIFFDQSKNGYAGYIDGGASQEEFYKFIKPILEKMDGTEELLVKLNREDLLRKQRTFDNGSIPHQIHLGELHAILRRQEDFYPFLKDNREKIEKILTFRIPYYVGPLARGNSRFAWMTRKSEETITPWNFEEVVDKGASAQSFIERMTNFDKNLPNEKVLPKHSLLYEYFTVYNELTKVKYVTEGMRKPAFLSGEQKKAIVDLLFKTNRKVTVKQLKEDYFKKIECFDSVEISGVEDRFNASLGTYHDLLKIIKDKDFLDNEENEDILEDIVLTLTLFEDREMIEERLKTYAHLFDDKVMKQLKRRRYTGWGRLSRKLINGIRDKQSGKTILDFLKSDGFANRNFMQLIHDDSLTFKEDIQKAQVSGQGDSLHEHIANLAGSPAIKKGILQTVKVVDELVKVMGRHKPENIVIEMARENQTTQKGQKNSRERMKRIEEGIKELGSQILKEHPVENTQLQNEKLYLYYLQNGRDMYVDQELDINRLSDYDVDHIVPQSFLKDDSIDNKVLTRSDKNRGKSDNVPSEEVVKKMKNYWRQLLNAKLITQRKFDNLTKAERGGLSELDKAGFIKRQLVETRQITKHVAQILDSRMNTKYDENDKLIREVKVITLKSKLVSDFRKDFQFYKVREINNYHHAHDAYLNAVVGTALIKKYPKLESEFVYGDYKVYDVRKMIAKSEQEIGKATAKYFFYSNIMNFFKTEITLANGEIRKRPLIETNGETGEIVWDKGRDFATVRKVLSMPQVNIVKKTEVQTGGFSKESILPKRNSDKLIARKKDWDPKKYGGFDSPTVAYSVLVVAKVEKGKSKKLKSVKELLGITIMERSSFEKNPIDFLEAKGYKEVKKDLIIKLPKYSLFELENGRKRMLASAGELQKGNELALPSKYVNFLYLASHYEKLKGSPEDNEQKQLFVEQHKHYLDEIIEQISEFSKRVILADANLDKVLSAYNKHRDKPIREQAENIIHLFTLTNLGAPAAFKYFDTTIDRKRYTSTKEVLDATLIHQSITGLYETRIDLSQLGGD

SEQ ID NO: 202 - DNA, 4107 bp, Streptococcus pyogenes
  misc_feature 1..4107: note = Cas9 from Streptococcus pyogenes (NCBI Ref. Seq.: NC_002737.2)polynucleotide sequence
  source 1..4107: mol_type = genomic DNA
atggataagaaatactcaataggcttagatatcggcacaaatagcgtcggatgggcggtgatcactgatgaatataaggttccgtctaaaaagttcaaggttctgggaaatacagaccgccacagtatcaaaaaaaatcttataggggctcttttatttgacagtggagagacagcggaagcgactcgtctcaaacggacagctcgtagaaggtatacacgtcggaagaatcgtatttgttatctacaggagattttttcaaatgagatggcgaaagtagatgatagtttctttcatcgacttgaagagtcttttttggtggaagaagacaagaagcatgaacgtcatcctatttttggaaatatagtagatgaagttgcttatcatgagaaatatccaactatctatcatctgcgaaaaaaattggtagattctactgataaagcggatttgcgcttaatctatttggccttagcgcatatgattaagtttcgtggtcattttttgattgagggagatttaaatcctgataatagtgatgtggacaaactatttatccagttggtacaaacctacaatcaattatttgaagaaaaccctattaacgcaagtggagtagatgctaaagcgattctttctgcacgattgagtaaatcaagacgattagaaaatctcattgctcagctccccggtgagaagaaaaatggcttatttgggaatctcattgctttgtcattgggtttgacccctaattttaaatcaaattttgatttggcagaagatgctaaattacagctttcaaaagatacttacgatgatgatttagataatttattggcgcaaattggagatcaatatgctgatttgtttttggcagctaagaatttatcagatgctattttactttcagatatcctaagagtaaatactgaaataactaaggctcccctatcagcttcaatgattaaacgctacgatgaacatcatcaagacttgactcttttaaaagctttagttcgacaacaacttccagaaaagtataaagaaatcttttttgatcaatcaaaaaacggatatgcaggttatattgatgggggagctagccaagaagaattttataaatttatcaaaccaattttagaaaaaatggatggtactgaggaattattggtgaaactaaatcgtgaagatttgctgcgcaagcaacggacctttgacaacggctctattccccatcaaattcacttgggtgagctgcatgctattttgagaagacaagaagacttttatccatttttaaaagacaatcgtgagaagattgaaaaaatcttgacttttcgaattccttattatgttggtccattggcgcgtggcaatagtcgttttgcatggatgactcggaagtctgaagaaacaattaccccatggaattttgaagaagttgtcgataaaggtgcttcagctcaatcatttattgaacgcatgacaaactttgataaaaatcttccaaatgaaaaagtactaccaaaacatagtttgctttatgagtattttacggtttataacgaattgacaaaggtcaaatatgttactgaaggaatgcgaaaaccagcatttctttcaggtgaacagaagaaagccattgttgatttactcttcaaaacaaatcgaaaagtaaccgttaagcaattaaaagaagattatttcaaaaaaatagaatgttttgatagtgttgaaatttcaggagttgaagatagatttaatgcttcattaggtacctaccatgatttgctaaaaattattaaagataaagattttttggataatgaagaaaatgaagatatcttagaggatattgttttaacattgaccttatttgaagatagggagatgattgaggaaagacttaaaacatatgctcacctctttgatgataaggtgatgaaacagcttaaacgtcgccgttatactggttggggacgtttgtctcgaaaattgattaatggtattagggataagcaatctggcaaaacaatattagattttttgaaatcagatggttttgccaatcgcaattttatgcagctgatccatgatgatagtttgacatttaaagaagacattcaaaaagcacaagtgtctggacaaggcgatagtttacatgaacatattgcaaatttagctggtagccctgctattaaaaaaggtattttacagactgtaaaagttgttgatgaattggtcaaagtaatggggcggcataagccagaaaatatcgttattgaaatggcacgtgaaaatcagacaactcaaaagggccagaaaaattcgcgagagcgtatgaaacgaatcgaagaaggtatcaaagaattaggaagtcagattcttaaagagcatcctgttgaaaatactcaattgcaaaatgaaaagctctatctctattatctccaaaatggaagagacatgtatgtggaccaagaattagatattaatcgtttaagtgattatgatgtcgatcacattgttccacaaagtttccttaaagacgattcaatagacaataaggtcttaacgcgttctgataaaaatcgtggtaaatcggataacgttccaagtgaagaagtagtcaaaaagatgaaaaactattggagacaacttctaaacgccaagttaatcactcaacgtaagtttgataatttaacgaaagctgaacgtggaggtttgagtgaacttgataaagctggttttatcaaacgccaattggttgaaactcgccaaatcactaagcatgtggcacaaattttggatagtcgcatgaatactaaatacgatgaaaatgataaacttattcgagaggttaaagtgattaccttaaaatctaaattagtttctgacttccgaaaagatttccaattctataaagtacgtgagattaacaattaccatcatgcccatgatgcgtatctaaatgccgtcgttggaactgctttgattaagaaatatccaaaacttgaatcggagtttgtctatggtgattataaagtttatgatgttcgtaaaatgattgctaagtctgagcaagaaataggcaaagcaaccgcaaaatatttcttttactctaatatcatgaacttcttcaaaacagaaattacacttgcaaatggagagattcgcaaacgccctctaatcgaaactaatggggaaactggagaaattgtctgggataaagggcgagattttgccacagtgcgcaaagtattgtccatgccccaagtcaatattgtcaagaaaacagaagtacagacaggcggattctccaaggagtcaattttaccaaaaagaaattcggacaagcttattgctcgtaaaaaagactgggatccaaaaaaatatggtggttttgatagtccaacggtagcttattcagtcctagtggttgctaaggtggaaaaagggaaatcgaagaagttaaaatccgttaaagagttactagggatcacaattatggaaagaagttcctttgaaaaaaatccgattgactttttagaagctaaaggatataaggaagttaaaaaagacttaatcattaaactacctaaatatagtctttttgagttagaaaacggtcgtaaacggatgctggctagtgccggagaattacaaaaaggaaatgagctggctctgccaagcaaatatgtgaattttttatatttagctagtcattatgaaaagttgaagggtagtccagaagataacgaacaaaaacaattgtttgtggagcagcataagcattatttagatgagattattgagcaaatcagtgaattttctaagcgtgttattttagcagatgccaatttagataaagttcttagtgcatataacaaacatagagacaaaccaatacgtgaacaagcagaaaatattattcatttatttacgttgacgaatcttggagctcccgctgcttttaaatattttgatacaacaattgatcgtaaacgatatacgtctacaaaagaagttttagatgccactcttatccatcaatccatcactggtctttatgaaacacgcattgatttgagtcagctaggaggtgactga

SEQ ID NO: 203 - protein, 1368 aa, synthetic construct
  REGION 1..1368: note = catalytically inactive Cas9 (dCas9)polypeptide sequence
  REGION 5..58: note = MISC_FEATURE - RuvC domain
  REGION 718..764: note = MISC_FEATURE - RuvC domain
  REGION 773..902: note = MISC_FEATURE - HNH domain
  REGION 907..1102: note = MISC_FEATURE - RuvC domain
MDKKYSIGLAIGTNSVGWAVITDEYKVPSKKFKVLGNTDRHSIKKNLIGALLFDSGETAEATRLKRTARRRYTRRKNRICYLQEIFSNEMAKVDDSFFHRLEESFLVEEDKKHERHPIFGNIVDEVAYHEKYPTIYHLRKKLVDSTDKADLRLIYLALAHMIKFRGHFLIEGDLNPDNSDVDKLFIQLVQTYNQLFEENPINASGVDAKAILSARLSKSRRLENLIAQLPGEKKNGLFGNLIALSLGLTPNFKSNFDLAEDAKLQLSKDTYDDDLDNLLAQIGDQYADLFLAAKNLSDAILLSDILRVNTEITKAPLSASMIKRYDEHHQDLTLLKALVRQQLPEKYKEIFFDQSKNGYAGYIDGGASQEEFYKFIKPILEKMDGTEELLVKLNREDLLRKQRTFDNGSIPHQIHLGELHAILRRQEDFYPFLKDNREKIEKILTFRIPYYVGPLARGNSRFAWMTRKSEETITPWNFEEVVDKGASAQSFIERMTNFDKNLPNEKVLPKHSLLYEYFTVYNELTKVKYVTEGMRKPAFLSGEQKKAIVDLLFKTNRKVTVKQLKEDYFKKIECFDSVEISGVEDRFNASLGTYHDLLKIIKDKDFLDNEENEDILEDIVLTLTLFEDREMIEERLKTYAHLFDDKVMKQLKRRRYTGWGRLSRKLINGIRDKQSGKTILDFLKSDGFANRNFMQLIHDDSLTFKEDIQKAQVSGQGDSLHEHIANLAGSPAIKKGILQTVKVVDELVKVMGRHKPENIVIEMARENQTTQKGQKNSRERMKRIEEGIKELGSQILKEHPVENTQLQNEKLYLYYLQNGRDMYVDQELDINRLSDYDVDAIVPQSFLKDDSIDNKVLTRSDKNRGKSDNVPSEEVVKKMKNYWRQLLNAKLITQRKFDNLTKAERGGLSELDKAGFIKRQLVETRQITKHVAQILDSRMNTKYDENDKLIREVKVITLKSKLVSDFRKDFQFYKVREINNYHHAHDAYLNAVVGTALIKKYPKLESEFVYGDYKVYDVRKMIAKSEQEIGKATAKYFFYSNIMNFFKTEITLANGEIRKRPLIETNGETGEIVWDKGRDFATVRKVLSMPQVNIVKKTEVQTGGFSKESILPKRNSDKLIARKKDWDPKKYGGFDSPTVAYSVLVVAKVEKGKSKKLKSVKELLGITIMERSSFEKNPIDFLEAKGYKEVKKDLIIKLPKYSLFELENGRKRMLASAGELQKGNELALPSKYVNFLYLASHYEKLKGSPEDNEQKQLFVEQHKHYLDEIIEQISEFSKRVILADANLDKVLSAYNKHRDKPIREQAENIIHLFTLTNLGAPAAFKYFDTTIDRKRYTSTKEVLDATLIHQSITGLYETRIDLSQLGGD

SEQ ID NO: 204 - protein, 345 aa, Sulfolobus islandicus
  REGION 1..345: note = MISC_FEATURE - tr|F0NN87|F0NN87_SULIHCRISPR-associatedCasx protein OS =Sulfolobus islandicus (strain HVE10/4) GN = SiH_0402 PE=4; SV = 1);CasX polypeptide sequence
MEVPLYNIFGDNYIIQVATEAENSTIYNNKVEIDDEELRNVLNLAYKIAKNNEDAAAERRGKAKKKKGEEGETTTSNIILPLSGNDKNPWTETLKCYNFPTTVALSEVFKNFSQVKECEEVSAPSFVKPEFYEFGRSPGMVERTRRVKLEVEPHYLIIAAAGWVLTRLGKAKVSEGDYVGVNVFTPTRGILYSLIQNVNGIVPGIKPETAFGLWIARKVVSSVTNPNVSVVRIYTISDAVGQNPTTINGGFSIDLTKLLEKRYLLSERLEAIARNALSISSNMRERYIVLANYIYEYLTGSKRLEDLLYFANRDLIMNLNSDDGKVRDLKLISAYVNGELIRGEG

SEQ ID NO: 205 - protein, 345 aa, Sulfolobus islandicus
  REGION 1..345: note = MISC_FEATURE - tr|F0NH53|F0NH53_SULIR CRISPR associated protein, Casx OS =Sulfolobus islandicus (strain REY15A) GN=SiRe_0771 PE=4 SV=1);CasX polypeptide sequence
MEVPLYNIFGDNYIIQVATEAENSTIYNNKVEIDDEELRNVLNLAYKIAKNNEDAAAERRGKAKKKKGEEGETTTSNIILPLSGNDKNPWTETLKCYNFPTTVALSEVFKNFSQVKECEEVSAPSFVKPEFYKFGRSPGMVERTRRVKLEVEPHYLIMAAAGWVLTRLGKAKVSEGDYVGVNVFTPTRGILYSLIQNVNGIVPGIKPETAFGLWIARKVVSSVTNPNVSVVSIYTISDAVGQNPTTINGGFSIDLTKLLEKRDLLSERLEAIARNALSISSNMRERYIVLANYIYEYLTGSKRLEDLLYFANRDLIMNLNSDDGKVRDLKLISAYVNGELIRGEG

SEQ ID NO: 206 - protein, 987 aa, unidentified
  REGION 1..987: note = MISC_FEATURE - CasX polypeptide sequence
MEKRINKIRKKLSADNATKPVSRSGPMKTLLVRVMTDDLKKRLEKRRKKPEVMPQVISNNAANNLRMLLDDYTKMKEAILQVYWQEFKDDHVGLMCKFAQPASKKIDQNKLKPEMDEKGNLTTAGFACSQCGQPLFVYKLEQVSEKGKAYTNYFGRCNVAEHEKLILLAQLKPVKDSDEAVTYSLGKFGQRALDFYSIHVTKESTHPVKPLAQIAGNRYASGPVGKALSDACMGTIASFLSKYQDIIIEHQKVVKGNQKRLESLRELAGKENLEYPSVTLPPQPHTKEGVDFAYNEVIARVRMWVNLNLWQKLKLSRDDAKPLLRLKGFPSFPVVERRENEVDWWNTINEVKKLIDAKRDMGRVFWSGVTAEKRNTILEGYNYLPNENDHKKREGSLENPKKPAKRQFGDLLLYLEKKYAGDWGKVFDEAWERIDKKIAGLTSHIEREEARNAEDAQSKAVLTDWLRAKASFVLERLKEMDEKEFYACEIQLQKWYGDLRGNPFAVEAENRVVDISGFSIGSDGHSIQYRNLLAWKYLENGKREFYLLMNYGKKGRIRFTDGTDIKKSGKWQGLLYGGGKAKVIDLTFDPDDEQLIILPLAFGTRQGREFIWNDLLSLETGLIKLANGRVIEKTIYNKKIGRDEPALFVALTFERREVVDPSNIKPVNLIGVARGENIPAVIALTDPEGCPLPEFKDSSGGPTDILRIGEGYKEKQRAIQAAKEVEQRRAGGYSRKFASKSRNLADDMVRNSARDLFYHAVTHDAVLVFANLSRGFGRQGKRTFMTERQYTKMEDWLTAKLAYEGLTSKTYLSKTLAQYTSKTCSNCGFTITYADMDVMLVRLKKTSDGWATTLNNKELKAEYQITYYNRYKRQTVEKELSAELDRLSEESGNNDISKWTKGRRDEALFLLKKRFSHRPVQEQFVCLDCGHEVHAAEQAALNIARSWLFLNSNSTEFKSYKSGKQPFVGAWQAFYKRRLKEVWKPNA

SEQ ID NO: 207 - protein, 1210 aa, unidentified
  REGION 1..1210: note = MISC_FEATURE - APG80656.1 CRISPR-associated protein CasY [uncultured Parcubacteria group bacterium]; CasY polypeptide sequence
MSKRHPRISGVKGYRLHAQRLEYTGKSGAMRTIKYPLYSSPSGGRTVPREIVSAINDDYVGLYGLSNFDDLYNAEKRNEEKVYSVLDFWYDCVQYGAVFSYTAPGLLKNVAEVRGGSYELTKTLKGSHLYDELQIDKVIKFLNKKEISRANGSLDKLKKDIIDCFKAEYRERHKDQCNKLADDIKNAKKDAGASLGERQKKLFRDFFGISEQSENDKPSFTNPLNLTCCLLPFDTVNNNRNRGEVLFNKLKEYAQKLDKNEGSLEMWEYIGIGNSGTAFSNFLGEGFLGRLRENKITELKKAMMDITDAWRGQEQEEELEKRLRILAALTIKLREPKFDNHWGGYRSDINGKLSSWLQNYINQTVKIKEDLKGHKKDLKKAKEMINRFGESDTKEEAVVSSLLESIEKIVPDDSADDEKPDIPAIAIYRRFLSDGRLTLNRFVQREDVQEALIKERLEAEKKKKPKKRKKKSDAEDEKETIDFKELFPHLAKPLKLVPNFYGDSKRELYKKYKNAAIYTDALWKAVEKIYKSAFSSSLKNSFFDTDFDKDFFIKRLQKIFSVYRRFNTDKWKPIVKNSFAPYCDIVSLAENEVLYKPKQSRSRKSAAIDKNRVRLPSTENIAKAGIALARELSVAGFDWKDLLKKEEHEEYIDLIELHKTALALLLAVTETQLDISALDFVENGTVKDFMKTRDGNLVLEGRFLEMFSQSIVFSELRGLAGLMSRKEFITRSAIQTMNGKQAELLYIPHEFQSAKITTPKEMSRAFLDLAPAEFATSLEPESLSEKSLLKLKQMRYYPHYFGYELTRTGQGIDGGVAENALRLEKSPVKKREIKCKQYKTLGRGQNKIVLYVRSSYYQTQFLEWFLHRPKNVQTDVAVSGSFLIDEKKVKTRWNYDALTVALEPVSGSERVFVSQPFTIFPEKSAEEEGQRYLGIDIGEYGIAYTALEITGDSAKILDQNFISDPQLKTLREEVKGLKLDQRRGTFAMPSTKIARIRESLVHSLRNRIHHLALKHKAKIVYELEVSRFEEGKQKIKKVYATLKKADVYSEIDADKNLQTTVWGKLAVASEISASYTSQFCGACKKLWRAEMQVDETITTQELIGTVRVIKGGTLIDAIKDFMRPPIFDENDTPFPKYRDFCDKHHISKKMRGNSCLFICPFCRANADADIQASQTIALLRYVKEEKKVEDYFERFRKLKNIKVLGQMKKI

SEQ ID NO: 208 - protein, 1082 aa, Neisseria meningitidis
  REGION 1..1082: note = MISC_FEATURE - NCBI Reference: WP_002235162.1; type II CRISPR RNA-guided endonuclease Cas9; Nme1Cas9 polypeptide sequence
MAAFKPNPINYILGLDIGIASVGWAMVEIDEDENPICLIDLGVRVFERAEVPKTGDSLAMARRLARSVRRLTRRRAHRLLRARRLLKREGVLQAADFDENGLIKSLPNTPWQLRAAALDRKLTPLEWSAVLLHLIKHRGYLSQRKNEGETADKELGALLKGVADNAHALQTGDFRTPAELALNKFEKESGHIRNQRGDYSHTFSRKDLQAELILLFEKQKEFGNPHVSGGLKEGIETLLMTQRPALSGDAVQKMLGHCTFEPAEPKAAKNTYTAERFIWLTKLNNLRILEQGSERPLTDTERATLMDEPYRKSKLTYAQARKLLGLEDTAFFKGLRYGKDNAEASTLMEMKAYHAISRALEKEGLKDKKSPLNLSPELQDEIGTAFSLFKTDEDITGRLKDRIQPEILEALLKHISFDKFVQISLKALRRIVPLMEQGKRYDEACAEIYGDHYGKKNTEEKIYLPPIPADEIRNPVVLRALSQARKVINGVVRRYGSPARIHIETAREVGKSFKDRKEIEKRQEENRKDREKAAAKFREYFPNFVGEPKSKDILKLRLYEQQHGKCLYSGKEINLGRLNEKGYVEIDHALPFSRTWDDSFNNKVLVLGSENQNKGNQTPYEYFNGKDNSREWQEFKARVETSRFPRSKKQRILLQKFDEDGFKERNLNDTRYVNRFLCQFVADRMRLTGKGKKRVFASNGQITNLLRGFWGLRKVRAENDRHHALDAVVVACSTVAMQQKITRFVRYKEMNAFDGKTIDKETGEVLHQKTHFPQPWEFFAQEVMIRVFGKPDGKPEFEEADTPEKLRTLLAEKLSSRPEAVHEYVTPLFVSRAPNRKMSGQGHMETVKSAKRLDEGVSVLRVPLTQLKLKDLEKMVNREREPKLYEALKARLEAHKDDPAKAFAEPFYKYDKAGNRTQQVKAVRVEQVQKTGVWVRNHNGIADNATMVRVDVFEKGDKYYLVPIYSWQVAKGILPDRAVVQGKDEEDWQLIDDSFNFKFSLHPNDLVEVITKKARMFGYFASCHRGTGNINIRIHDLDHKIGKNGILEGIGVKTALSFQKYQIDELGKEIRPCRLKKRPPVR

SEQ ID NO: 209 - protein, 1082 aa, Neisseria meningitidis
  REGION 1..1082: note = MISC_FEATURE - NCBI Reference: WP_002230835; type II CRISPR RNA-guided endonuclease Cas9; Nme2Cas9 polypeptide sequence
MAAFKPNPINYILGLDIGIASVGWAMVEIDEEENPIRLIDLGVRVFERAEVPKTGDSLAMARRLARSVRRLTRRRAHRLLRARRLLKREGVLQAADFDENGLIKSLPNTPWQLRAAALDRKLTPLEWSAVLLHLIKHRGYLSQRKNEGETADKELGALLKGVANNAHALQTGDFRTPAELALNKFEKESGHIRNQRGDYSHTFSRKDLQAELILLFEKQKEFGNPHVSGGLKEGIETLLMTQRPALSGDAVQKMLGHCTFEPAEPKAAKNTYTAERFIWLTKLNNLRILEQGSERPLTDTERATLMDEPYRKSKLTYAQARKLLGLEDTAFFKGLRYGKDNAEASTLMEMKAYHAISRALEKEGLKDKKSPLNLSSELQDEIGTAFSLFKTDEDITGRLKDRVQPEILEALLKHISFDKFVQISLKALRRIVPLMEQGKRYDEACAEIYGDHYGKKNTEEKIYLPPIPADEIRNPVVLRALSQARKVINGVVRRYGSPARIHIETAREVGKSFKDRKEIEKRQEENRKDREKAAAKFREYFPNFVGEPKSKDILKLRLYEQQHGKCLYSGKEINLVRLNEKGYVEIDHALPFSRTWDDSFNNKVLVLGSENQNKGNQTPYEYFNGKDNSREWQEFKARVETSRFPRSKKQRILLQKFDEDGFKECNLNDTRYVNRFLCQFVADHILLTGKGKRRVFASNGQITNLLRGFWGLRKVRAENDRHHALDAVVVACSTVAMQQKITRFVRYKEMNAFDGKTIDKETGKVLHQKTHFPQPWEFFAQEVMIRVFGKPDGKPEFEEADTPEKLRTLLAEKLSSRPEAVHEYVTPLFVSRAPNRKMSGAHKDTLRSAKRFVKHNEKISVKRVWLTEIKLADLENMVNYKNGREIELYEALKARLEAYGGNAKQAFDPKDNPFYKKGGQLVKAVRVEKTQESGVLLNKKNAYTIADNGDMVRVDVFCKVDKKGKNQYFIVPIYAWQVAENILPDIDCKGYRIDDSYTFCFSLHKYDLIAFQKDEKSKVEFAYYINCDSSNGRFYLAWHDKGSKEQQFRISTQNLVLIQKYQVNELGKEIRPCRLKKRPPVR

SEQ ID NO: 210 - protein, 1300 aa, Francisella tularensis
  REGION 1..1300: note = MISC_FEATURE - wild type Cpf1 polypeptide sequence
  source 1..1300: note = subspecies novicida
MSIYQEFVNKYSLSKTLRFELIPQGKTLENIKARGLILDDEKRAKDYKKAKQIIDKYHQFFIEEILSSVCISEDLLQNYSDVYFKLKKSDDDNLQKDFKSAKDTIKKQISEYIKDSEKFKNLFNQNLIDAKKGQESDLILWLKQSKDNGIELFKANSDITDIDEALEIIKSFKGWTTYFKGFHENRKNVYSSNDIPTSIIYRIVDDNLPKFLENKAKYESLKDKAPEAINYEQIKKDLAEELTFDIDYKTSEVNQRVFSLDEVFEIANFNNYLNQSGITKFNTIIGGKFVNGENTKRKGINEYINLYSQQINDKTLKKYKMSVLFKQILSDTESKSFVIDKLEDDSDVVTTMQSFYEQIAAFKTVEEKSIKETLSLLFDDLKAQKLDLSKIYFKNDKSLTDLSQQVFDDYSVIGTAVLEYITQQIAPKNLDNPSKKEQELIAKKTEKAKYLSLETIKLALEEFNKHRDIDKQCRFEEILANFAAIPMIFDEIAQNKDNLAQISIKYQNQGKKDLLQASAEDDVKAIKDLLDQTNNLLHKLKIFHISQSEDKANILDKDEHFYLVFEECYFELANIVPLYNKIRNYITQKPYSDEKFKLNFENSTLANGWDKNKEPDNTAILFIKDDKYYLGVMNKKNNKIFDDKAIKENKGEGYKKIVYKLLPGANKMLPKVFFSAKSIKFYNPSEDILRIRNHSTHTKNGSPQKGYEKFEFNIEDCRKFIDFYKQSISKHPEWKDFGFRFSDTQRYNSIDEFYREVENQGYKLTFENISESYIDSVVNQGKLYLFQIYNKDFSAYSKGRPNLHTLYWKALFDERNLQDVVYKLNGEAELFYRKQSIPKKITHPAKEAIANKNKDNPKKESVFEYDLIKDKRFTEDKFFFHCPITINFKSSGANKFNDEINLLLKEKANDVHILSIDRGERHLAYYTLVDGKGNIIKQDTFNIIGNDRMKTNYHDKLAAIEKDRDSARKDWKKINNIKEMKEGYLSQVVHEIAKLVIEYNAIVVFEDLNFGFKRGRFKVEKQVYQKLEKMLIEKLNYLVFKDNEFDKTGGVLRAYQLTAPFETFKKMGKQTGIIYYVPAGFTSKICPVTGFVNQLYPKYESVSKSQEFFSKFDKICYNLDKGYFEFSFDYKNFGDKAAKGKWTIASFGSRLINFRNSDKNHNWDTREVYPTKELEKLLKDYSIEYGHGECIKAAICGESDKKFFAKLTSVLNTILQMRNSKTGTELDYLISPVADVNGNFFDSRQAPKNMPQDADANGAYHIGLKGLMLLGRIKNNQEGKKLNLVIKNEEYFEFVQNRNN

SEQ ID NO: 211 - protein, 1300 aa, Francisella tularensis
  REGION 1..1300: note = MISC_FEATURE - Cpf1 D917A polypeptide sequence
  source 1..1300: note = subspecies novicida
MSIYQEFVNKYSLSKTLRFELIPQGKTLENIKARGLILDDEKRAKDYKKAKQIIDKYHQFFIEEILSSVCISEDLLQNYSDVYFKLKKSDDDNLQKDFKSAKDTIKKQISEYIKDSEKFKNLFNQNLIDAKKGQESDLILWLKQSKDNGIELFKANSDITDIDEALEIIKSFKGWTTYFKGFHENRKNVYSSNDIPTSIIYRIVDDNLPKFLENKAKYESLKDKAPEAINYEQIKKDLAEELTFDIDYKTSEVNQRVFSLDEVFEIANFNNYLNQSGITKFNTIIGGKFVNGENTKRKGINEYINLYSQQINDKTLKKYKMSVLFKQILSDTESKSFVIDKLEDDSDVVTTMQSFYEQIAAFKTVEEKSIKETLSLLFDDLKAQKLDLSKIYFKNDKSLTDLSQQVFDDYSVIGTAVLEYITQQIAPKNLDNPSKKEQELIAKKTEKAKYLSLETIKLALEEFNKHRDIDKQCRFEEILANFAAIPMIFDEIAQNKDNLAQISIKYQNQGKKDLLQASAEDDVKAIKDLLDQTNNLLHKLKIFHISQSEDKANILDKDEHFYLVFEECYFELANIVPLYNKIRNYITQKPYSDEKFKLNFENSTLANGWDKNKEPDNTAILFIKDDKYYLGVMNKKNNKIFDDKAIKENKGEGYKKIVYKLLPGANKMLPKVFFSAKSIKFYNPSEDILRIRNHSTHTKNGSPQKGYEKFEFNIEDCRKFIDFYKQSISKHPEWKDFGFRFSDTQRYNSIDEFYREVENQGYKLTFENISESYIDSVVNQGKLYLFQIYNKDFSAYSKGRPNLHTLYWKALFDERNLQDVVYKLNGEAELFYRKQSIPKKITHPAKEAIANKNKDNPKKESVFEYDLIKDKRFTEDKFFFHCPITINFKSSGANKFNDEINLLLKEKANDVHILSIARGERHLAYYTLVDGKGNIIKQDTFNIIGNDRMKTNYHDKLAAIEKDRDSARKDWKKINNIKEMKEGYLSQVVHEIAKLVIEYNAIVVFEDLNFGFKRGRFKVEKQVYQKLEKMLIEKLNYLVFKDNEFDKTGGVLRAYQLTAPFETFKKMGKQTGIIYYVPAGFTSKICPVTGFVNQLYPKYESVSKSQEFFSKFDKICYNLDKGYFEFSFDYKNFGDKAAKGKWTIASFGSRLINFRNSDKNHNWDTREVYPTKELEKLLKDYSIEYGHGECIKAAICGESDKKFFAKLTSVLNTILQMRNSKTGTELDYLISPVADVNGNFFDSRQAPKNMPQDADANGAYHIGLKGLMLLGRIKNNQEGKKLNLVIKNEEYFEFVQNRNN

SEQ ID NO: 212 - protein, 1300 aa, Francisella tularensis
  REGION 1..1300: note = MISC_FEATURE - Cpf1 E1006A polypeptide sequence
  source 1..1300: note = subspecies novicida
MSIYQEFVNKYSLSKTLRFELIPQGKTLENIKARGLILDDEKRAKDYKKAKQIIDKYHQFFIEEILSSVCISEDLLQNYSDVYFKLKKSDDDNLQKDFKSAKDTIKKQISEYIKDSEKFKNLFNQNLIDAKKGQESDLILWLKQSKDNGIELFKANSDITDIDEALEIIKSFKGWTTYFKGFHENRKNVYSSNDIPTSIIYRIVDDNLPKFLENKAKYESLKDKAPEAINYEQIKKDLAEELTFDIDYKTSEVNQRVFSLDEVFEIANFNNYLNQSGITKFNTIIGGKFVNGENTKRKGINEYINLYSQQINDKTLKKYKMSVLFKQILSDTESKSFVIDKLEDDSDVVTTMQSFYEQIAAFKTVEEKSIKETLSLLFDDLKAQKLDLSKIYFKNDKSLTDLSQQVFDDYSVIGTAVLEYITQQIAPKNLDNPSKKEQELIAKKTEKAKYLSLETIKLALEEFNKHRDIDKQCRFEEILANFAAIPMIFDEIAQNKDNLAQISIKYQNQGKKDLLQASAEDDVKAIKDLLDQTNNLLHKLKIFHISQSEDKANILDKDEHFYLVFEECYFELANIVPLYNKIRNYITQKPYSDEKFKLNFENSTLANGWDKNKEPDNTAILFIKDDKYYLGVMNKKNNKIFDDKAIKENKGEGYKKIVYKLLPGANKMLPKVFFSAKSIKFYNPSEDILRIRNHSTHTKNGSPQKGYEKFEFNIEDCRKFIDFYKQSISKHPEWKDFGFRFSDTQRYNSIDEFYREVENQGYKLTFENISESYIDSVVNQGKLYLFQIYNKDFSAYSKGRPNLHTLYWKALFDERNLQDVVYKLNGEAELFYRKQSIPKKITHPAKEAIANKNKDNPKKESVFEYDLIKDKRFTEDKFFFHCPITINFKSSGANKFNDEINLLLKEKANDVHILSIDRGERHLAYYTLVDGKGNIIKQDTFNIIGNDRMKTNYHDKLAAIEKDRDSARKDWKKINNIKEMKEGYLSQVVHEIAKLVIEYNAIVVFADLNFGFKRGRFKVEKQVYQKLEKMLIEKLNYLVFKDNEFDKTGGVLRAYQLTAPFETFKKMGKQTGIIYYVPAGFTSKICPVTGFVNQLYPKYESVSKSQEFFSKFDKICYNLDKGYFEFSFDYKNFGDKAAKGKWTIASFGSRLINFRNSDKNHNWDTREVYPTKELEKLLKDYSIEYGHGECIKAAICGESDKKFFAKLTSVLNTILQMRNSKTGTELDYLISPVADVNGNFFDSRQAPKNMPQDADANGAYHIGLKGLMLLGRIKNNQEGKKLNLVIKNEEYFEFVQNRNN

SEQ ID NO: 213 - protein, 1300 aa, Francisella tularensis
  REGION 1..1300: note = MISC_FEATURE - Cpf1 D1255A polypeptide sequence
  source 1..1300: note = subspecies novicida
MSIYQEFVNKYSLSKTLRFELIPQGKTLENIKARGLILDDEKRAKDYKKAKQIIDKYHQFFIEEILSSVCISEDLLQNYSDVYFKLKKSDDDNLQKDFKSAKDTIKKQISEYIKDSEKFKNLFNQNLIDAKKGQESDLILWLKQSKDNGIELFKANSDITDIDEALEIIKSFKGWTTYFKGFHENRKNVYSSNDIPTSIIYRIVDDNLPKFLENKAKYESLKDKAPEAINYEQIKKDLAEELTFDIDYKTSEVNQRVFSLDEVFEIANFNNYLNQSGITKFNTIIGGKFVNGENTKRKGINEYINLYSQQINDKTLKKYKMSVLFKQILSDTESKSFVIDKLEDDSDVVTTMQSFYEQIAAFKTVEEKSIKETLSLLFDDLKAQKLDLSKIYFKNDKSLTDLSQQVFDDYSVIGTAVLEYITQQIAPKNLDNPSKKEQELIAKKTEKAKYLSLETIKLALEEFNKHRDIDKQCRFEEILANFAAIPMIFDEIAQNKDNLAQISIKYQNQGKKDLLQASAEDDVKAIKDLLDQTNNLLHKLKIFHISQSEDKANILDKDEHFYLVFEECYFELANIVPLYNKIRNYITQKPYSDEKFKLNFENSTLANGWDKNKEPDNTAILFIKDDKYYLGVMNKKNNKIFDDKAIKENKGEGYKKIVYKLLPGANKMLPKVFFSAKSIKFYNPSEDILRIRNHSTHTKNGSPQKGYEKFEFNIEDCRKFIDFYKQSISKHPEWKDFGFRFSDTQRYNSIDEFYREVENQGYKLTFENISESYIDSVVNQGKLYLFQIYNKDFSAYSKGRPNLHTLYWKALFDERNLQDVVYKLNGEAELFYRKQSIPKKITHPAKEAIANKNKDNPKKESVFEYDLIKDKRFTEDKFFFHCPITINFKSSGANKFNDEINLLLKEKANDVHILSIDRGERHLAYYTLVDGKGNIIKQDTFNIIGNDRMKTNYHDKLAAIEKDRDSARKDWKKINNIKEMKEGYLSQVVHEIAKLVIEYNAIVVFEDLNFGFKRGRFKVEKQVYQKLEKMLIEKLNYLVFKDNEFDKTGGVLRAYQLTAPFETFKKMGKQTGIIYYVPAGFTSKICPVTGFVNQLYPKYESVSKSQEFFSKFDKICYNLDKGYFEFSFDYKNFGDKAAKGKWTIASFGSRLINFRNSDKNHNWDTREVYPTKELEKLLKDYSIEYGHGECIKAAICGESDKKFFAKLTSVLNTILQMRNSKTGTELDYLISPVADVNGNFFDSRQAPKNMPQDAAANGAYHIGLKGLMLLGRIKNNQEGKKLNLVIKNEEYFEFVQNRNN

SEQ ID NO: 214 - protein, 1300 aa, Francisella tularensis
  REGION 1..1300: note = MISC_FEATURE - Cpf1 D917A/E1006A polypeptide sequence
  source 1..1300: note = subspecies novicida
MSIYQEFVNKYSLSKTLRFELIPQGKTLENIKARGLILDDEKRAKDYKKAKQIIDKYHQFFIEEILSSVCISEDLLQNYSDVYFKLKKSDDDNLQKDFKSAKDTIKKQISEYIKDSEKFKNLFNQNLIDAKKGQESDLILWLKQSKDNGIELFKANSDITDIDEALEIIKSFKGWTTYFKGFHENRKNVYSSNDIPTSIIYRIVDDNLPKFLENKAKYESLKDKAPEAINYEQIKKDLAEELTFDIDYKTSEVNQRVFSLDEVFEIANFNNYLNQSGITKFNTIIGGKFVNGENTKRKGINEYINLYSQQINDKTLKKYKMSVLFKQILSDTESKSFVIDKLEDDSDVVTTMQSFYEQIAAFKTVEEKSIKETLSLLFDDLKAQKLDLSKIYFKNDKSLTDLSQQVFDDYSVIGTAVLEYITQQIAPKNLDNPSKKEQELIAKKTEKAKYLSLETIKLALEEFNKHRDIDKQCRFEEILANFAAIPMIFDEIAQNKDNLAQISIKYQNQGKKDLLQASAEDDVKAIKDLLDQTNNLLHKLKIFHISQSEDKANILDKDEHFYLVFEECYFELANIVPLYNKIRNYITQKPYSDEKFKLNFENSTLANGWDKNKEPDNTAILFIKDDKYYLGVMNKKNNKIFDDKAIKENKGEGYKKIVYKLLPGANKMLPKVFFSAKSIKFYNPSEDILRIRNHSTHTKNGSPQKGYEKFEFNIEDCRKFIDFYKQSISKHPEWKDFGFRFSDTQRYNSIDEFYREVENQGYKLTFENISESYIDSVVNQGKLYLFQIYNKDFSAYSKGRPNLHTLYWKALFDERNLQDVVYKLNGEAELFYRKQSIPKKITHPAKEAIANKNKDNPKKESVFEYDLIKDKRFTEDKFFFHCPITINFKSSGANKFNDEINLLLKEKANDVHILSIARGERHLAYYTLVDGKGNIIKQDTFNIIGNDRMKTNYHDKLAAIEKDRDSARKDWKKINNIKEMKEGYLSQVVHEIAKLVIEYNAIVVFADLNFGFKRGRFKVEKQVYQKLEKMLIEKLNYLVFKDNEFDKTGGVLRAYQLTAPFETFKKMGKQTGIIYYVPAGFTSKICPVTGFVNQLYPKYESVSKSQEFFSKFDKICYNLDKGYFEFSFDYKNFGDKAAKGKWTIASFGSRLINFRNSDKNHNWDTREVYPTKELEKLLKDYSIEYGHGECIKAAICGESDKKFFAKLTSVLNTILQMRNSKTGTELDYLISPVADVNGNFFDSRQAPKNMPQDADANGAYHIGLKGLMLLGRIKNNQEGKKLNLVIKNEEYFEFVQNRNN

SEQ ID NO: 215 - protein, 1300 aa, Francisella tularensis
  REGION 1..1300: note = MISC_FEATURE - Cpf1 D917A/D1255A polypeptide sequence
  source 1..1300: note = subspecies novicida
MSIYQEFVNKYSLSKTLRFELIPQGKTLENIKARGLILDDEKRAKDYKKAKQIIDKYHQFFIEEILSSVCISEDLLQNYSDVYFKLKKSDDDNLQKDFKSAKDTIKKQISEYIKDSEKFKNLFNQNLIDAKKGQESDLILWLKQSKDNGIELFKANSDITDIDEALEIIKSFKGWTTYFKGFHENRKNVYSSNDIPTSIIYRIVDDNLPKFLENKAKYESLKDKAPEAINYEQIKKDLAEELTFDIDYKTSEVNQRVFSLDEVFEIANFNNYLNQSGITKFNTIIGGKFVNGENTKRKGINEYINLYSQQINDKTLKKYKMSVLFKQILSDTESKSFVIDKLEDDSDVVTTMQSFYEQIAAFKTVEEKSIKETLSLLFDDLKAQKLDLSKIYFKNDKSLTDLSQQVFDDYSVIGTAVLEYITQQIAPKNLDNPSKKEQELIAKKTEKAKYLSLETIKLALEEFNKHRDIDKQCRFEEILANFAAIPMIFDEIAQNKDNLAQISIKYQNQGKKDLLQASAEDDVKAIKDLLDQTNNLLHKLKIFHISQSEDKANILDKDEHFYLVFEECYFELANIVPLYNKIRNYITQKPYSDEKFKLNFENSTLANGWDKNKEPDNTAILFIKDDKYYLGVMNKKNNKIFDDKAIKENKGEGYKKIVYKLLPGANKMLPKVFFSAKSIKFYNPSEDILRIRNHSTHTKNGSPQKGYEKFEFNIEDCRKFIDFYKQSISKHPEWKDFGFRFSDTQRYNSIDEFYREVENQGYKLTFENISESYIDSVVNQGKLYLFQIYNKDFSAYSKGRPNLHTLYWKALFDERNLQDVVYKLNGEAELFYRKQSIPKKITHPAKEAIANKNKDNPKKESVFEYDLIKDKRFTEDKFFFHCPITINFKSSGANKFNDEINLLLKEKANDVHILSIARGERHLAYYTLVDGKGNIIKQDTFNIIGNDRMKTNYHDKLAAIEKDRDSARKDWKKINNIKEMKEGYLSQVVHEIAKLVIEYNAIVVFEDLNFGFKRGRFKVEKQVYQKLEKMLIEKLNYLVFKDNEFDKTGGVLRAYQLTAPFETFKKMGKQTGIIYYVPAGFTSKICPVTGFVNQLYPKYESVSKSQEFFSKFDKICYNLDKGYFEFSFDYKNFGDKAAKGKWTIASFGSRLINFRNSDKNHNWDTREVYPTKELEKLLKDYSIEYGHGECIKAAICGESDKKFFAKLTSVLNTILQMRNSKTGTELDYLISPVADVNGNFFDSRQAPKNMPQDAAANGAYHIGLKGLMLLGRIKNNQEGKKLNLVIKNEEYFEFVQNRNN

SEQ ID NO: 216 - protein, 1300 aa, Francisella tularensis
  REGION 1..1300: note = MISC_FEATURE - Cpf1 E1006A/D1255A polypeptide sequence
  source 1..1300: note = subspecies novicida
MSIYQEFVNKYSLSKTLRFELIPQGKTLENIKARGLILDDEKRAKDYKKAKQIIDKYHQFFIEEILSSVCISEDLLQNYSDVYFKLKKSDDDNLQKDFKSAKDTIKKQISEYIKDSEKFKNLFNQNLIDAKKGQESDLILWLKQSKDNGIELFKANSDITDIDEALEIIKSFKGWTTYFKGFHENRKNVYSSNDIPTSIIYRIVDDNLPKFLENKAKYESLKDKAPEAINYEQIKKDLAEELTFDIDYKTSEVNQRVFSLDEVFEIANFNNYLNQSGITKFNTIIGGKFVNGENTKRKGINEYINLYSQQINDKTLKKYKMSVLFKQILSDTESKSFVIDKLEDDSDVVTTMQSFYEQIAAFKTVEEKSIKETLSLLFDDLKAQKLDLSKIYFKNDKSLTDLSQQVFDDYSVIGTAVLEYITQQIAPKNLDNPSKKEQELIAKKTEKAKYLSLETIKLALEEFNKHRDIDKQCRFEEILANFAAIPMIFDEIAQNKDNLAQISIKYQNQGKKDLLQASAEDDVKAIKDLLDQTNNLLHKLKIFHISQSEDKANILDKDEHFYLVFEECYFELANIVPLYNKIRNYITQKPYSDEKFKLNFENSTLANGWDKNKEPDNTAILFIKDDKYYLGVMNKKNNKIFDDKAIKENKGEGYKKIVYKLLPGANKMLPKVFFSAKSIKFYNPSEDILRIRNHSTHTKNGSPQKGYEKFEFNIEDCRKFIDFYKQSISKHPEWKDFGFRFSDTQRYNSIDEFYREVENQGYKLTFENISESYIDSVVNQGKLYLFQIYNKDFSAYSKGRPNLHTLYWKALFDERNLQDVVYKLNGEAELFYRKQSIPKKITHPAKEAIANKNKDNPKKESVFEYDLIKDKRFTEDKFFFHCPITINFKSSGANKFNDEINLLLKEKANDVHILSIDRGERHLAYYTLVDGKGNIIKQDTFNIIGNDRMKTNYHDKLAAIEKDRDSARKDWKKINNIKEMKEGYLSQVVHEIAKLVIEYNAIVVFADLNFGFKRGRFKVEKQVYQKLEKMLIEKLNYLVFKDNEFDKTGGVLRAYQLTAPFETFKKMGKQTGIIYYVPAGFTSKICPVTGFVNQLYPKYESVSKSQEFFSKFDKICYNLDKGYFEFSFDYKNFGDKAAKGKWTIASFGSRLINFRNSDKNHNWDTREVYPTKELEKLLKDYSIEYGHGECIKAAICGESDKKFFAKLTSVLNTILQMRNSKTGTELDYLISPVADVNGNFFDSRQAPKNMPQDAAANGAYHIGLKGLMLLGRIKNNQEGKKLNLVIKNEEYFEFVQNRNN

SEQ ID NO: 217 - protein, 1300 aa, Francisella tularensis
  REGION 1..1300: note = MISC_FEATURE - Cpf1 D917A/E1006A/D1255A polypeptide sequence
  source 1..1300: note = subspecies novicida
MSIYQEFVNKYSLSKTLRFELIPQGKTLENIKARGLILDDEKRAKDYKKAKQIIDKYHQFFIEEILSSVCISEDLLQNYSDVYFKLKKSDDDNLQKDFKSAKDTIKKQISEYIKDSEKFKNLFNQNLIDAKKGQESDLILWLKQSKDNGIELFKANSDITDIDEALEIIKSFKGWTTYFKGFHENRKNVYSSNDIPTSIIYRIVDDNLPKFLENKAKYESLKDKAPEAINYEQIKKDLAEELTFDIDYKTSEVNQRVFSLDEVFEIANFNNYLNQSGITKFNTIIGGKFVNGENTKRKGINEYINLYSQQINDKTLKKYKMSVLFKQILSDTESKSFVIDKLEDDSDVVTTMQSFYEQIAAFKTVEEKSIKETLSLLFDDLKAQKLDLSKIYFKNDKSLTDLSQQVFDDYSVIGTAVLEYITQQIAPKNLDNPSKKEQELIAKKTEKAKYLSLETIKLALEEFNKHRDIDKQCRFEEILANFAAIPMIFDEIAQNKDNLAQISIKYQNQGKKDLLQASAEDDVKAIKDLLDQTNNLLHKLKIFHISQSEDKANILDKDEHFYLVFEECYFELANIVPLYNKIRNYITQKPYSDEKFKLNFENSTLANGWDKNKEPDNTAILFIKDDKYYLGVMNKKNNKIFDDKAIKENKGEGYKKIVYKLLPGANKMLPKVFFSAKSIKFYNPSEDILRIRNHSTHTKNGSPQKGYEKFEFNIEDCRKFIDFYKQSISKHPEWKDFGFRFSDTQRYNSIDEFYREVENQGYKLTFENISESYIDSVVNQGKLYLFQIYNKDFSAYSKGRPNLHTLYWKALFDERNLQDVVYKLNGEAELFYRKQSIPKKITHPAKEAIANKNKDNPKKESVFEYDLIKDKRFTEDKFFFHCPITINFKSSGANKFNDEINLLLKEKANDVHILSIARGERHLAYYTLVDGKGNIIKQDTFNIIGNDRMKTNYHDKLAAIEKDRDSARKDWKKINNIKEMKEGYLSQVVHEIAKLVIEYNAIVVFADLNFGFKRGRFKVEKQVYQKLEKMLIEKLNYLVFKDNEFDKTGGVLRAYQLTAPFETFKKMGKQTGIIYYVPAGFTSKICPVTGFVNQLYPKYESVSKSQEFFSKFDKICYNLDKGYFEFSFDYKNFGDKAAKGKWTIASFGSRLINFRNSDKNHNWDTREVYPTKELEKLLKDYSIEYGHGECIKAAICGESDKKFFAKLTSVLNTILQMRNSKTGTELDYLISPVADVNGNFFDSRQAPKNMPQDAAANGAYHIGLKGLMLLGRIKNNQEGKKLNLVIKNEEYFEFVQNRNN

SEQ ID NO: 218 - protein, 1052 aa, Staphylococcus aureus
  REGION 1..1052: note = MISC_FEATURE - Exemplary SaCas9 polypeptide sequence
KRNYILGLDIGITSVGYGIIDYETRDVIDAGVRLFKEANVENNEGRRSKRGARRLKRRRRHRIQRVKKLLFDYNLLTDHSELSGINPYEARVKGLSQKLSEEEFSAALLHLAKRRGVHNVNEVEEDTGNELSTKEQISRNSKALEEKYVAELQLERLKKDGEVRGSINRFKTSDYVKEAKQLLKVQKAYHQLDQSFIDTYIDLLETRRTYYEGPGEGSPFGWKDIKEWYEMLMGHCTYFPEELRSVKYAYNADLYNALNDLNNLVITRDENEKLEYYEKFQIIENVFKQKKKPTLKQIAKEILVNEEDIKGYRVTSTGKPEFTNLKVYHDIKDITARKEIIENAELLDQIAKILTIYQSSEDIQEELTNLNSELTQEEIEQISNLKGYTGTHNLSLKAINLILDELWHTNDNQIAIFNRLKLVPKKVDLSQQKEIPTTLVDDFILSPVVKRSFIQSIKVINAIIKKYGLPNDIIIELAREKNSKDAQKMINEMQKRNRQTNERIEEIIRTTGKENAKYLIEKIKLHDMQEGKCLYSLEAIPLEDLLNNPFNYEVDHIIPRSVSFDNSFNNKVLVKQEENSKKGNRTPFQYLSSSDSKISYETFKKHILNLAKGKGRISKTKKEYLLEERDINRFSVQKDFINRNLVDTRYATRGLMNLLRSYFRVNNLDVKVKSINGGFTSFLRRKWKFKKERNKGYKHHAEDALIIANADFIFKEWKKLDKAKKVMENQMFEEKQAESMPEIETEQEYKEIFITPHQIKHIKDFKDYKYSHRVDKKPNRELINDTLYSTRKDDKGNTLIVNNLNGLYDKDNDKLKKLINKSPEKLLMYHHDPQTYQKLKLIMEQYGDEKNPLYKYYEETGNYLTKYSKKDNGPVIKKIKYYGNKLNAHLDITDDYPNSRNKVVKLSLKPYRFDVYLDNGVYKFVTVKNLDVIKKENYYEVNSKCYEEAKKLKKISNQAEFIASFYNNDLIKINGELYRVIGVNNDLLNRIEVNMIDITYREYLENMNDKRPPRIIKTIASKTQSIKKYSTDILGNLYEVKSKKHPQIIKKG

SEQ ID NO: 219 - protein, 1052 aa, Staphylococcus aureus
  REGION 1..1052: note = MISC_FEATURE - SaCas9n polypeptide sequence
KRNYILGLDIGITSVGYGIIDYETRDVIDAGVRLFKEANVENNEGRRSKRGARRLKRRRRHRIQRVKKLLFDYNLLTDHSELSGINPYEARVKGLSQKLSEEEFSAALLHLAKRRGVHNVNEVEEDTGNELSTKEQISRNSKALEEKYVAELQLERLKKDGEVRGSINRFKTSDYVKEAKQLLKVQKAYHQLDQSFIDTYIDLLETRRTYYEGPGEGSPFGWKDIKEWYEMLMGHCTYFPEELRSVKYAYNADLYNALNDLNNLVITRDENEKLEYYEKFQIIENVFKQKKKPTLKQIAKEILVNEEDIKGYRVTSTGKPEFTNLKVYHDIKDITARKEIIENAELLDQIAKILTIYQSSEDIQEELTNLNSELTQEEIEQISNLKGYTGTHNLSLKAINLILDELWHTNDNQIAIFNRLKLVPKKVDLSQQKEIPTTLVDDFILSPVVKRSFIQSIKVINAIIKKYGLPNDIIIELAREKNSKDAQKMINEMQKRNRQTNERIEEIIRTTGKENAKYLIEKIKLHDMQEGKCLYSLEAIPLEDLLNNPFNYEVDHIIPRSVSFDNSFNNKVLVKQEEASKKGNRTPFQYLSSSDSKISYETFKKHILNLAKGKGRISKTKKEYLLEERDINRFSVQKDFINRNLVDTRYATRGLMNLLRSYFRVNNLDVKVKSINGGFTSFLRRKWKFKKERNKGYKHHAEDALIIANADFIFKEWKKLDKAKKVMENQMFEEKQAESMPEIETEQEYKEIFITPHQIKHIKDFKDYKYSHRVDKKPNRELINDTLYSTRKDDKGNTLIVNNLNGLYDKDNDKLKKLINKSPEKLLMYHHDPQTYQKLKLIMEQYGDEKNPLYKYYEETGNYLTKYSKKDNGPVIKKIKYYGNKLNAHLDITDDYPNSRNKVVKLSLKPYRFDVYLDNGVYKFVTVKNLDVIKKENYYEVNSKCYEEAKKLKKISNQAEFIASFYNNDLIKINGELYRVIGVNNDLLNRIEVNMIDITYREYLENMNDKRPPRIIKTIASKTQSIKKYSTDILGNLYEVKSKKHPQIIKKG

SEQ ID NO: 220 - protein, 1052 aa, Staphylococcus aureus
  REGION 1..1052: note = MISC_FEATURE - SaKKH Cas9 polypeptide sequence
KRNYILGLDIGITSVGYGIIDYETRDVIDAGVRLFKEANVENNEGRRSKRGARRLKRRRRHRIQRVKKLLFDYNLLTDHSELSGINPYEARVKGLSQKLSEEEFSAALLHLAKRRGVHNVNEVEEDTGNELSTKEQISRNSKALEEKYVAELQLERLKKDGEVRGSINRFKTSDYVKEAKQLLKVQKAYHQLDQSFIDTYIDLLETRRTYYEGPGEGSPFGWKDIKEWYEMLMGHCTYFPEELRSVKYAYNADLYNALNDLNNLVITRDENEKLEYYEKFQIIENVFKQKKKPTLKQIAKEILVNEEDIKGYRVTSTGKPEFTNLKVYHDIKDITARKEIIENAELLDQIAKILTIYQSSEDIQEELTNLNSELTQEEIEQISNLKGYTGTHNLSLKAINLILDELWHTNDNQIAIFNRLKLVPKKVDLSQQKEIPTTLVDDFILSPVVKRSFIQSIKVINAIIKKYGLPNDIIIELAREKNSKDAQKMINEMQKRNRQTNERIEEIIRTTGKENAKYLIEKIKLHDMQEGKCLYSLEAIPLEDLLNNPFNYEVDHIIPRSVSFDNSFNNKVLVKQEEASKKGNRTPFQYLSSSDSKISYETFKKHILNLAKGKGRISKTKKEYLLEERDINRFSVQKDFINRNLVDTRYATRGLMNLLRSYFRVNNLDVKVKSINGGFTSFLRRKWKFKKERNKGYKHHAEDALIIANADFIFKEWKKLDKAKKVMENQMFEEKQAESMPEIETEQEYKEIFITPHQIKHIKDFKDYKYSHRVDKKPNRKLINDTLYSTRKDDKGNTLIVNNLNGLYDKDNDKLKKLINKSPEKLLMYHHDPQTYQKLKLIMEQYGDEKNPLYKYYEETGNYLTKYSKKDNGPVIKKIKYYGNKLNAHLDITDDYPNSRNKVVKLSLKPYRFDVYLDNGVYKFVTVKNLDVIKKENYYEVNSKCYEEAKKLKKISNQAEFIASFYKNDLIKINGELYRVIGVNNDLLNRIEVNMIDITYREYLENMNDKRPPHIIKTIASKTQSIKKYSTDILGNLYEVKSKKHPQIIKKG

SEQ ID NO: 221 - protein, 707 aa, synthetic construct
  REGION 1..707: note = Casphi-1 polypeptide sequence
MADTPTLFTQFLRHHLPGQRFRKDILKQAGRILANKGEDATIAFLRGKSEESPPDFQPPVKCPIIACSRPLTEWPIYQASVAIQGYVYGQSLAEFEASDPGCSKDGLLGWFDKTGVCTDYFSVQGLNLIFQNARKRYIGVQTKVTNRNEKRHKKLKRINAKRIAEGLPELTSDEPESALDETGHLIDPPGLNTNIYCYQQVSPKPLALSEVNQLPTAYAGYSTSGDDPIQPMVTKDRLSISKGQPGYIPEHQRALLSQKKHRRMRGYGLKARALLVIVRIQDDWAVIDLRSLLRNAYWRRIVQTKEPSTITKLLKLVTGDPVLDATRMVATFTYKPGIVQVRSAKCLKNKQGSKLFSERYLNETVSVTSIDLGSNNLVAVATYRLVNGNTPELLQRFTLPSHLVKDFERYKQAHDTLEDSIQKTAVASLPQGQQTEIRMWSMYGFREAQERVCQELGLADGSIPWNVMTATSTILTDLFLARGGDPKKCMFTSEPKKKKNSKQVLYKIRDRAWAKMYRTLLSKETREAWNKALWGLKRGSPDYARLSKRKEELARRCVNYTISTAEKRAQCGRTIVALEDLNIGFFHGRGKQEPGWVGLFTRKKENRWLMQALHKAFLELAHHRGYHVIEVNPAYTSQTCPVCRHCDPDNRDQHNREAFHCIGCGFRGNADLDVATHNIAMVAITGESLKRARGSVASKTPQPLAAE

SEQ ID NO: 222 - protein, 757 aa, synthetic construct
  REGION 1..757: note = Casphi-2 polypeptide sequence
MPKPAVESEFSKVLKKHFPGERFRSSYMKRGGKILAAQGEEAVVAYLQGKSEEEPPNFQPPAKCHVVTKSRDFAEWPIMKASEAIQRYIYALSTTERAACKPGKSSESHAAWFAATGVSNHGYSHVQGLNLIFDHTLGRYDGVLKKVQLRNEKARARLESINASRADEGLPEIKAEEEEVATNETGHLLQPPGINPSFYVYQTISPQAYRPRDEIVLPPEYAGYVRDPNAPIPLGVVRNRCDIQKGCPGYIPEWQREAGTAISPKTGKAVTVPGLSPKKNKRMRRYWRSEKEKAQDALLVTVRIGTDWVVIDVRGLLRNARWRTIAPKDISLNALLDLFTGDPVIDVRRNIVTFTYTLDACGTYARKWTLKGKQTKATLDKLTATQTVALVAIDLGQTNPISAGISRVTQENGALQCEPLDRFTLPDDLLKDISAYRIAWDRNEEELRARSVEALPEAQQAEVRALDGVSKETARTQLCADFGLDPKRLPWDKMSSNTTFISEALLSNSVSRDQVFFTPAPKKGAKKKAPVEVMRKDRTWARAYKPRLSVEAQKLKNEALWALKRTSPEYLKLSRRKEELCRRSINYVIEKTRRRTQCQIVIPVIEDLNVRFFHGSGKRLPGWDNFFTAKKENRWFIQGLHKAFSDLRTHRSFYVFEVRPERTSITCPKCGHCEVGNRDGEAFQCLSCGKTCNADLDVATHNLTQVALTGKTMPKREEPRDAQGTAPARKTKKASKSKAPPAEREDQTPAQEPSQTS

SEQ ID NO: 223 - protein, 766 aa, synthetic construct
  REGION 1..766: note = Casphi-3 polypeptide sequence
MEKEITELTKIRREFPNKKFSSTDMKKAGKLLKAEGPDAVRDFLNSCQEIIGDFKPPVKTNIVSISRPFEEWPVSMVGRAIQEYYFSLTKEELESVHPGTSSEDHKSFFNITGLSNYNYTSVQGLNLIFKNAKAIYDGTLVKANNKNKKLEKKFNEINHKRSLEGLPIITPDFEEPFDENGHLNNPPGINRNIYGYQGCAAKVFVPSKHKMVSLPKEYEGYNRDPNLSLAGFRNRLEIPEGEPGHVPWFQRMDIPEGQIGHVNKIQRFNFVHGKNSGKVKFSDKTGRVKRYHHSKYKDATKPYKFLEESKKVSALDSILAIITIGDDWVVFDIRGLYRNVFYRELAQKGLTAVQLLDLFTGDPVIDPKKGVVTFSYKEGVVPVFSQKIVPRFKSRDTLEKLTSQGPVALLSVDLGQNEPVAARVCSLKNINDKITLDNSCRISFLDDYKKQIKDYRDSLDELEIKIRLEAINSLETNQQVEIRDLDVFSADRAKANTVDMFDIDPNLISWDSMSDARVSTQISDLYLKNGGDESRVYFEINNKRIKRSDYNISQLVRPKLSDSTRKNLNDSIWKLKRTSEEYLKLSKRKLELSRAVVNYTIRQSKLLSGINDIVIILEDLDVKKKFNGRGIRDIGWDNFFSSRKENRWFIPAFHKAFSELSSNRGLCVIEVNPAWTSATCPDCGFCSKENRDGINFTCRKCGVSYHADIDVATLNIARVAVLGKPMSGPADRERLGDTKKPRVARSRKTMKRKDISNSTVEAMVTA

SEQ ID NO: 224 - protein, 765 aa, synthetic construct
  REGION 1..765: note = Casphi-4 polypeptide sequence
MYSLEMADLKSEPSLLAKLLRDRFPGKYWLPKYWKLAEKKRLTGGEEAACEYMADKQLDSPPPNFRPPARCVILAKSRPFEDWPVHRVASKAQSFVIGLSEQGFAALRAAPPSTADARRDWLRSHGASEDDLMALEAQLLETIMGNAISLHGGVLKKIDNANVKAAKRLSGRNEARLNKGLQELPPEQEGSAYGADGLLVNPPGLNLNIYCRKSCCPKPVKNTARFVGHYPGYLRDSDSILISGTMDRLTIIEGMPGHIPAWQREQGLVKPGGRRRRLSGSESNMRQKVDPSTGPRRSTRSGTVNRSNQRTGRNGDPLLVEIRMKEDWVLLDARGLLRNLRWRESKRGLSCDHEDLSLSGLLALFSGDPVIDPVRNEVVFLYGEGIIPVRSTKPVGTRQSKKLLERQASMGPLTLISCDLGQTNLIAGRASAISLTHGSLGVRSSVRIELDPEIIKSFERLRKDADRLETEILTAAKETLSDEQRGEVNSHEKDSPQTAKASLCRELGLHPPSLPWGQMGPSTTFIADMLISHGRDDDAFLSHGEFPTLEKRKKFDKRFCLESRPLLSSETRKALNESLWEVKRTSSEYARLSQRKKEMARRAVNFVVEISRRKTGLSNVIVNIEDLNVRIFHGGGKQAPGWDGFFRPKSENRWFIQAIHKAFSDLAAHHGIPVIESDPQRTSMTCPECGHCDSKNRNGVRFLCKGCGASMDADFDAACRNLERVALTGKPMPKPSTSCERLLSATTGKVCSDHSLSHDAIEKAS

SEQ ID NO: 225 - protein, 793 aa, synthetic construct
  REGION 1..793: note = Casphi-5 polypeptide sequence
MSSLPTPLELLKQKHADLFKGLQFSSKDNKMAGKVLKKDGEEAALAFLSERGVSRGELPNFRPPAKTLVVAQSRPFEEFPIYRVSEAIQLYVYSLSVKELETVPSGSSTKKEHQRFFQDSSVPDFGYTSVQGLNKIFGLARGIYLGVITRGENQLQKAKSKHEALNKKRRASGEAETEFDPTPYEYMTPERKLAKPPGVNHSIMCYVDISVDEFDFRNPDGIVLPSEYAGYCREINTAIEKGTVDRLGHLKGGPGYIPGHQRKESTTEGPKINFRKGRIRRSYTALYAKRDSRRVRQGKLALPSYRHHMMRLNSNAESAILAVIFFGKDWVVFDLRGLLRNVRWRNLFVDGSTPSTLLGMFGDPVIDPKRGVVAFCYKEQIVPVVSKSITKMVKAPELLNKLYLKSEDPLVLVAIDLGQTNPVGVGVYRVMNASLDYEVVTRFALESELLREIESYRQRTNAFEAQIRAETFDAMTSEEQEEITRVRAFSASKAKENVCHRFGMPVDAVDWATMGSNTIHIAKWVMRHGDPSLVEVLEYRKDNEIKLDKNGVPKKVKLTDKRIANLTSIRLRFSQETSKHYNDTMWELRRKHPVYQKLSKSKADFSRRVVNSIIRRVNHLVPRARIVFIIEDLKNLGKVFHGSGKRELGWDSYFEPKSENRWFIQVLHKAFSETGKHKGYYIIECWPNWTSCTCPKCSCCDSENRHGEVFRCLACGYTCNTDFGTAPDNLVKIATTGKGLPGPKKRCKGSSKGKNPKIARSSETGVSVTESGAPKVKKSSPTQTSQSSSQSAP

SEQ ID NO: 226 - protein, 441 aa, synthetic construct
  REGION 1..441: note = Casphi-6 polypeptide sequence
MNKIEKEKTPLAKLMNENFAGLRFPFAIIKQAGKKLLKEGELKTIEYMTGKGSIEPLPNFKPPVKCLIVAKRRDLKYFPICKASCEIQSYVYSLNYKDFMDYFSTPMTSQKQHEEFFKKSGLNIEYQNVAGLNLIFNNVKNTYNGVILKVKNRNEKLKKKAIKNNYEFEEIKTFNDDGCLINKPGINNVIYCFQSISPKILKNITHLPKEYNDYDCSVDRNIIQKYVSRLDIPESQPGHVPEWQRKLPEFNNTNNPRRRRKWYSNGRNISKGYSVDQVNQAKIEDSLLAQIKIGEDWIILDIRGLLRDLNRRELISYKNKLTIKDVLGFFSDYPIIDIKKNLVTFCYKEGVIQVVSQKSIGNKKSKQLLEKLIENKPIALVSIDLGQTNPVSVKISKLNKINNKISIESFTYRFLNEEILKEIEKYRKDYDKLELKLINEA

SEQ ID NO: 227 - protein, 772 aa, synthetic construct
  REGION 1..772: note = Casphi-7 polypeptide sequence
MSNTAVSTREHMSNKTTPPSPLSLLLRAHFPGLKFESQDYKIAGKKLRDGGPEAVISYLTGKGQAKLKDVKPPAKAFVIAQSRPFIEWDLVRVSRQIQEKIFGIPATKGRPKQDGLSETAFNEAVASLEVDGKSKLNEETRAAFYEVLGLDAPSLHAQAQNALIKSAISIREGVLKKVENRNEKNLSKTKRRKEAGEEATFVEEKAHDERGYLIHPPGVNQTIPGYQAVVIKSCPSDFIGLPSGCLAKESAEALTDYLPHDRMTIPKGQPGYVPEWQHPLLNRRKNRRRRDWYSASLNKPKATCSKRSGTPNRKNSRTDQIQSGRFKGAIPVLMRFQDEWVIIDIRGLLRNARYRKLLKEKSTIPDLLSLFTGDPSIDMRQGVCTFIYKAGQACSAKMVKTKNAPEILSELTKSGPVVLVSIDLGQTNPIAAKVSRVTQLSDGQLSHETLLRELLSNDSSDGKEIARYRVASDRLRDKLANLAVERLSPEHKSEILRAKNDTPALCKARVCAALGLNPEMIAWDKMTPYTEFLATAYLEKGGDRKVATLKPKNRPEMLRRDIKFKGTEGVRIEVSPEAAEAYREAQWDLQRTSPEYLRLSTWKQELTKRILNQLRHKAAKSSQCEVVVMAFEDLNIKMMHGNGKWADGGWDAFFIKKRENRWFMQAFHKSLTELGAHKGVPTIEVTPHRTSITCTKCGHCDKANRDGERFACQKCGFVAHADLEIATDNIERVALTGKPMPKPESERSGDAKKSVGARKAAFKPEEDAEAAE

SEQ ID NO: 228 - protein, 717 aa, synthetic construct
  REGION 1..717: note = Casphi-8 polypeptide sequence
MIKPTVSQFLTPGFKLIRNHSRTAGLKLKNEGEEACKKFVRENEIPKDECPNFQGGPAIANIIAKSREFTEWEIYQSSLAIQEVIFTLPKDKLPEPILKEEWRAQWLSEHGLDTVPYKEAAGLNLIIKNAVNTYKGVQVKVDNKNKNNLAKINRKNEIAKLNGEQEISFEEIKAFDDKGYLLQKPSPNKSIYCYQSVSPKPFITSKYHNVNLPEEYIGYYRKSNEPIVSPYQFDRLRIPIGEPGYVPKWQYTFLSKKENKRRKLSKRIKNVSPILGIICIKKDWCVFDMRGLLRTNHWKKYHKPTDSINDLFDYFTGDPVIDTKANVVRFRYKMENGIVNYKPVREKKGKELLENICDQNGSCKLATVDVGQNNPVAIGLFELKKVNGELTKTLISRHPTPIDFCNKITAYRERYDKLESSIKLDAIKQLTSEQKIEVDNYNNNFTPQNTKQIVCSKLNINPNDLPWDKMISGTHFISEKAQVSNKSEIYFTSTDKGKTKDVMKSDYKWFQDYKPKLSKEVRDALSDIEWRLRRESLEFNKLSKSREQDARQLANWISSMCDVIGIENLVKKNNFFGGSGKREPGWDNFYKPKKENRWWINAIHKALTELSQNKGKRVILLPAMRTSITCPKCKYCDSKNRNGEKFNCLKCGIELNADIDVATENLATVAITAQSMPKPTCERSGDAKKPVRARKAKAPEFHDKLAPSYTVVLREAV

SEQ ID NO: 229 - protein, 793 aa, synthetic construct
  REGION 1..793: note = Casphi-9 polypeptide sequence
MRSSREIGDKILMRQPAEKTAFQVFRQEVIGTQKLSGGDAKTAGRLYKQGKMEAAREWLLKGARDDVPPNFQPPAKCLVVAVSHPFEEWDISKTNHDVQAYIYAQPLQAEGHLNGLSEKWEDTSADQHKLWFEKTGVPDRGLPVQAINKIAKAAVNRAFGVVRKVENRNEKRRSRDNRIAEHNRENGLTEVVREAPEVATNADGFLLHPPGIDPSILSYASVSPVPYNSSKHSFVRLPEEYQAYNVEPDAPIPQFVVEDRFAIPPGQPGYVPEWQRLKCSTNKHRRMRQWSNQDYKPKAGRRAKPLEFQAHLTRERAKGALLVVMRIKEDWVVFDVRGLLRNVEWRKVLSEEAREKLTLKGLLDLFTGDPVIDTKRGIVTFLYKAEITKILSKRTVKTKNARDLLLRLTEPGEDGLRREVGLVAVDLGQTHPIAAAIYRIGRTSAGALESTVLHRQGLREDQKEKLKEYRKRHTALDSRLRKEAFETLSVEQQKEIVTVSGSGAQITKDKVCNYLGVDPSTLPWEKMGSYTHFISDDFLRRGGDPNIVHFDRQPKKGKVSKKSQRIKRSDSQWVGRMRPRLSQETAKARMEADWAAQNENEEYKRLARSKQELARWCVNTLLQNTRCITQCDEIVVVIEDLNVKSLHGKGAREPGWDNFFTPKTENRWFIQILHKTFSELPKHRGEHVIEGCPLRTSITCPACSYCDKNSRNGEKFVCVACGATFHADFEVATYNLVRLATTGMPMPKSLERQGGGEKAGGARKARKKAKQVEKIVVQANANVTMNGASLHSP

SEQ ID NO: 230 - protein, 812 aa, synthetic construct
  REGION 1..812: note = Casphi-10 polypeptide sequence
MDMLDTETNYATETPAQQQDYSPKPPKKAQRAPKGFSKKARPEKKPPKPITLFTQKHFSGVRFLKRVIRDASKILKLSESRTITFLEQAIERDGSAPPDVTPPVHNTIMAVTRPFEEWPEVILSKALQKHCYALTKKIKIKTWPKKGPGKKCLAAWSARTKIPLIPGQVQATNGLFDRIGSIYDGVEKKVTNRNANKKLEYDEAIKEGRNPAVPEYETAYNIDGTLINKPGYNPNLYITQSRTPRLITEADRPLVEKILWQMVEKKTQSRNQARRARLEKAAHLQGLPVPKFVPEKVDRSQKIEIRIIDPLDKIEPYMPQDRMAIKASQDGHVPYWQRPFLSKRRNRRVRAGWGKQVSSIQAWLTGALLVIVRLGNEAFLADIRGALRNAQWRKLLKPDATYQSLFNLFTGDPVVNTRTNHLTMAYREGVVNIVKSRSFKGRQTREHLLTLLGQGKTVAGVSFDLGQKHAAGLLAAHFGLGEDGNPVFTPIQACFLPQRYLDSLTNYRNRYDALTLDMRRQSLLALTPAQQQEFADAQRDPGGQAKRACCLKLNLNPDEIRWDLVSGISTMISDLYIERGGDPRDVHQQVETKPKGKRKSEIRILKIRDGKWAYDFRPKIADETRKAQREQLWKLQKASSEFERLSRYKINIARAIANWALQWGRELSGCDIVIPVLEDLNVGSKFFDGKGKWLLGWDNRFTPKKENRWFIKVLHKAVAELAPHRGVPVYEVMPHRTSMTCPACHYCHPTNREGDRFECQSCHVVKNTDRDVAPYNILRVAVEGKTLDRWQAEKKPQAEPDRPMILIDNQES

SEQ ID NO: 231 - protein, 84 aa, synthetic construct
  REGION 1..84: note = synthetic polypeptide sequence
MTNLSDIIEKETGKQLVIQESILMLPEEVEEVIGNKPESDILVHTAYDESTDENVMLLTSDAPEYKPWALVIQDSNGENKIKML

SEQ ID NO: 232 - protein, 1129 aa, Alicyclobacillus acidoterrestris
  REGION 1..1129: note = MISC_FEATURE - Cas12b/C2c1; sp|T0D7A2|C2C1_ALIAG CRISPR-associated endonuclease C2c1 OS = Alicyclobacillus acido-terrestris (strain ATCC 49025 /DSM 3922/ CIP 106132 / NCIMB 13137/GD3B) GN=c2c1 PE=1 SV=1; Cas12b/C2c1 polypeptide sequence
MAVKSIKVKLRLDDMPEIRAGLWKLHKEVNAGVRYYTEWLSLLRQENLYRRSPNGDGEQECDKTAEECKAELLERLRARQVENGHRGPAGSDDELLQLARQLYELLVPQAIGAKGDAQQIARKFLSPLADKDAVGGLGIAKAGNKPRWVRMREAGEPGWEEEKEKAETRKSADRTADVLRALADFGLKPLMRVYTDSEMSSVEWKPLRKGQAVRTWDRDMFQQAIERMMSWESWNQRVGQEYAKLVEQKNRFEQKNFVGQEHLVHLVNQLQQDMKEASPGLESKEQTAHYVTGRALRGSDKVFEKWGKLAPDAPFDLYDAEIKNVQRRNTRRFGSHDLFAKLAEPEYQALWREDASFLTRYAVYNSILRKLNHAKMFATFTLPDATAHPIWTRFDKLGGNLHQYTFLFNEFGERRHAIRFHKLLKVENGVAREVDDVTVPISMSEQLDNLLPRDPNEPIALYFRDYGAEQHFTGEFGGAKIQCRRDQLAHMHRRRGARDVYLNVSVRVQSQSEARGERRPPYAAVFRLVGDNHRAFVHFDKLSDYLAEHPDDGKLGSEGLLSGLRVMSVDLGLRTSASISVFRVARKDELKPNSKGRVPFFFPIKGNDNLVAVHERSQLLKLPGETESKDLRAIREERQRTLRQLRTQLAYLRLLVRCGSEDVGRRERSWAKLIEQPVDAANHMTPDWREAFENELQKLKSLHGICSDKEWMDAVYESVRRVWRHMGKQVRDWRKDVRSGERPKIRGYAKDVVGGNSIEQIEYLERQYKFLKSWSFFGKVSGQVIRAEKGSRFAITLREHIDHAKEDRLKKLADRIIMEALGYVYALDERGKGKWVAKYPPCQLILLEELSEYQFNNDRPPSENNQLMQWSHRGVFQELINQAQVHDLLVGTMYAAFSSRFDARTGAPGIRCRRVPARCTQEHNPEPFPWWLNKFVVEHTLDACPLRADDLIPTGEGEIFVSPFSAEEGDFHQIHADLNAAQNLQQRLWSDFDISQIRLRCDWGEVDGELVLIPRLTGKRTADSYSNKVFYTNTGVTYYERERGKKRRKVFAQEKLSEEEAELLVEADEAREKSVVLMRDPSGIINRGNWTRQKEFWSMVNQRIEGYLVKQIRSRVPLQDSACENTGDI

SEQ ID NO: 233 - protein, 1368 aa, Mus musculus
  REGION 1..1368: note = MISC_FEATURE - high fidelity Cas9 polypeptide sequence
MDKKYSIGLAIGTNSVGWAVITDEYKVPSKKFKVLGNTDRHSIKKNLIGALLFDSGETAEATRLKRTARRRYTRRKNRICYLQEIFSNEMAKVDDSFFHRLEESFLVEEDKKHERHPIFGNIVDEVAYHEKYPTIYHLRKKLVDSTDKADLRLIYLALAHMIKFRGHFLIEGDLNPDNSDVDKLFIQLVQTYNQLFEENPINASGVDAKAILSARLSKSRRLENLIAQLPGEKKNGLFGNLIALSLGLTPNFKSNFDLAEDAKLQLSKDTYDDDLDNLLAQIGDQYADLFLAAKNLSDAILLSDILRVNTEITKAPLSASMIKRYDEHHQDLTLLKALVRQQLPEKYKEIFFDQSKNGYAGYIDGGASQEEFYKFIKPILEKMDGTEELLVKLNREDLLRKQRTFDNGSIPHQIHLGELHAILRRQEDFYPFLKDNREKIEKILTFRIPYYVGPLARGNSRFAWMTRKSEETITPWNFEEVVDKGASAQSFIERMTAFDKNLPNEKVLPKHSLLYEYFTVYNELTKVKYVTEGMRKPAFLSGEQKKAIVDLLFKTNRKVTVKQLKEDYFKKIECFDSVEISGVEDRFNASLGTYHDLLKIIKDKDFLDNEENEDILEDIVLTLTLFEDREMIEERLKTYAHLFDDKVMKQLKRRRYTGWGALSRKLINGIRDKQSGKTILDFLKSDGFANRNFMALIHDDSLTFKEDIQKAQVSGQGDSLHEHIANLAGSPAIKKGILQTVKVVDELVKVMGRHKPENIVIEMARENQTTQKGQKNSRERMKRIEEGIKELGSQILKEHPVENTQLQNEKLYLYYLQNGRDMYVDQELDINRLSDYDVDHIVPQSFLKDDSIDNKVLTRSDKNRGKSDNVPSEEVVKKMKNYWRQLLNAKLITQRKFDNLTKAERGGLSELDKAGFIKRQLVETRAITKHVAQILDSRMNTKYDENDKLIREVKVITLKSKLVSDFRKDFQFYKVREINNYHHAHDAYLNAVVGTALIKKYPKLESEFVYGDYKVYDVRKMIAKSEQEIGKATAKYFFYSNIMNFFKTEITLANGEIRKRPLIETNGETGEIVWDKGRDFATVRKVLSMPQVNIVKKTEVQTGGFSKESILPKRNSDKLIARKKDWDPKKYGGFDSPTVAYSVLVVAKVEKGKSKKLKSVKELLGITIMERSSFEKNPIDFLEAKGYKEVKKDLIIKLPKYSLFELENGRKRMLASAGELQKGNELALPSKYVNFLYLASHYEKLKGSPEDNEQKQLFVEQHKHYLDEIIEQISEFSKRVILADANLDKVLSAYNKHRDKPIREQAENIIHLFTLTNLGAPAAFKYFDTTIDRKRYTSTKEVLDATLIHQSITGLYETRIDLSQLGGD

SEQ ID NO: 234 - protein, 1368 aa, Streptococcus pyogenes
  REGION 1..1368: note = MISC_FEATURE - PAM-binding SpEQR Cas9 polypeptide sequence
MDKKYSIGLAIGTNSVGWAVITDEYKVPSKKFKVLGNTDRHSIKKNLIGALLFDSGETAEATRLKRTARRRYTRRKNRICYLQEIFSNEMAKVDDSFFHRLEESVLVEEDKKHERHPIFGNIVDEVAYHEKYPTIYHLRKKLVDSTDKADLRLIYLALAHMIKFRGHFLIEGDLNPDNSDVDKLFIQLVQTYNQLFEENPINASGVDAKAILSARLSKSRRLENLIAQLPGEKKNGLFGNLIALSLGLTPNFKSNFDLAEDAKLQLSKDTYDDDLDNLLAQIGDQYADLFLAAKNLSDAILLSDILRVNTEITKAPLSASMIKRYDEHHQDLTLLKALVRQQLPEKYKEIFFDQSKNGYAGYIDGGASQEEFYKFIKPILEKMDGTEELLVKLNREDLLRKQRTFDNGSIPHQIHLGELHAILRRQEDFYPFLKDNREKIEKILTFRIPYYVGPLARGNSRFAWMTRKSEETITPWNFEEVVDKGASAQSFIERMTNFDKNLPNEKVLPKHSLLYEYFTVYNELTKVKYVTEGMRKPAFLSGEQKKAIVDLLFKTNRKVTVKQLKEDYFKKIECFDSVEISGVEDRFNASLGTYHDLLKIIKDKDFLDNEENEDILEDIVLTLTLFEDREMIEERLKTYAHLFDDKVMKQLKRRRYTGWGRLSRKLINGIRDKQSGKTILDFLKSDGFANRNFMQLIHDDSLTFKEDIQKAQVSGQGDSLHEHIANLAGSPAIKKGILQTVKVVDELVKVMGRHKPENIVIEMARENQTTQKGQKNSRERMKRIEEGIKELGSQILKEHPVENTQLQNEKLYLYYLQNGRDMYVDQELDINRLSDYDVDHIVPQSFLKDDSIDNKVLTRSDKNRGKSDNVPSEEVVKKMKNYWRQLLNAKLITQRKFDNLTKAERGGLSELDKAGFIKRQLVETRQITKHVAQILDSRMNTKYDENDKLIREVKVITLKSKLVSDFRKDFQFYKVREINNYHHAHDAYLNAVVGTALIKKYPKLESEFVYGDYKVYDVRKMIAKSEQEIGKATAKYFFYSNIMNFFKTEITLANGEIRKRPLIETNGETGEIVWDKGRDFATVRKVLSMPQVNIVKKTEVQTGGFSKESILPKRNSDKLIARKKDWDPKKYGGFESPTVAYSVLVVAKVEKGKSKKLKSVKELLGITIMERSSFEKNPIDFLEAKGYKEVKKDLIIKLPKYSLFELENGRKRMLASAGELQKGNELALPSKYVNFLYLASHYEKLKGSPEDNEQKQLFVEQHKHYLDEIIEQISEFSKRVILADANLDKVLSAYNKHRDKPIREQAENIIHLFTLTNLGAPAAFKYFDTTIDRKQYRSTKEVLDATLIHQSITGLYETRIDLSQLGGD

SEQ ID NO: 235 - protein, 1368 aa, Streptococcus pyogenes
  REGION 1..1368: note = MISC_FEATURE - PAM-binding SpVQR Cas9 polypeptide sequence
MDKKYSIGLAIGTNSVGWAVITDEYKVPSKKFKVLGNTDRHSIKKNLIGALLFDSGETAEATRLKRTARRRYTRRKNRICYLQEIFSNEMAKVDDSFFHRLEESFLVEEDKKHERHPIFGNIVDEVAYHEKYPTIYHLRKKLVDSTDKADLRLIYLALAHMIKFRGHFLIEGDLNPDNSDVDKLFIQLVQTYNQLFEENPINASGVDAKAILSARLSKSRRLENLIAQLPGEKKNGLFGNLIALSLGLTPNFKSNFDLAEDAKLQLSKDTYDDDLDNLLAQIGDQYADLFLAAKNLSDAILLSDILRVNTEITKAPLSASMIKRYDEHHQDLTLLKALVRQQLPEKYKEIFFDQSKNGYAGYIDGGASQEEFYKFIKPILEKMDGTEELLVKLNREDLLRKQRTFDNGSIPHQIHLGELHAILRRQEDFYPFLKDNREKIEKILTFRIPYYVGPLARGNSRFAWMTRKSEETITPWNFEEVVDKGASAQSFIERMTNFDKNLPNEKVLPKHSLLYEYFTVYNELTKVKYVTEGMRKPAFLSGEQKKAIVDLLFKTNRKVTVKQLKEDYFKKIECFDSVEISGVEDRFNASLGTYHDLLKIIKDKDFLDNEENEDILEDIVLTLTLFEDREMIEERLKTYAHLFDDKVMKQLKRRRYTGWGRLSRKLINGIRDKQSGKTILDFLKSDGFANRNFMQLIHDDSLTFKEDIQKAQVSGQGDSLHEHIANLAGSPAIKKGILQTVKVVDELVKVMGRHKPENIVIEMARENQTTQKGQKNSRERMKRIEEGIKELGSQILKEHPVENTQLQNEKLYLYYLQNGRDMYVDQELDINRLSDYDVDHIVPQSFLKDDSIDNKVLTRSDKNRGKSDNVPSEEVVKKMKNYWRQLLNAKLITQRKFDNLTKAERGGLSELDKAGFIKRQLVETRQITKHVAQILDSRMNTKYDENDKLIREVKVITLKSKLVSDFRKDFQFYKVREINNYHHAHDAYLNAVVGTALIKKYPKLESEFVYGDYKVYDVRKMIAKSEQEIGKATAKYFFYSNIMNFFKTEITLANGEIRKRPLIETNGETGEIVWDKGRDFATVRKVLSMPQVNIVKKTEVQTGGFSKESILPKRNSDKLIARKKDWDPKKYGGFVSPTVAYSVLVVAKVEKGKSKKLKSVKELLGITIMERSSFEKNPIDFLEAKGYKEVKKDLIIKLPKYSLFELENGRKRMLASAGELQKGNELALPSKYVNFLYLASHYEKLKGSPEDNEQKQLFVEQHKHYLDEIIEQISEFSKRVILADANLDKVLSAYNKHRDKPIREQAENIIHLFTLTNLGAPAAFKYFDTTIDRKQYRSTKEVLDATLIHQSITGLYETRIDLSQLGGD

SEQ ID NO: 236 - protein, 1368 aa, Streptococcus pyogenes
  REGION 1..1368: note = MISC_FEATURE - SpVQR Cas9 polypeptide sequence
MDKKYSIGLAIGTNSVGWAVITDEYKVPSKKFKVLGNTDRHSIKKNLIGALLFDSGETAEATRLKRTARRRYTRRKNRICYLQEIFSNEMAKVDDSFFHRLEESFLVEEDKKHERHPIFGNIVDEVAYHEKYPTIYHLRKKLVDSTDKADLRLIYLALAHMIKFRGHFLIEGDLNPDNSDVDKLFIQLVQTYNQLFEENPINASGVDAKAILSARLSKSRRLENLIAQLPGEKKNGLFGNLIALSLGLTPNFKSNFDLAEDAKLQLSKDTYDDDLDNLLAQIGDQYADLFLAAKNLSDAILLSDILRVNTEITKAPLSASMIKRYDEHHQDLTLLKALVRQQLPEKYKEIFFDQSKNGYAGYIDGGASQEEFYKFIKPILEKMDGTEELLVKLNREDLLRKQRTFDNGSIPHQIHLGELHAILRRQEDFYPFLKDNREKIEKILTFRIPYYVGPLARGNSRFAWMTRKSEETITPWNFEEVVDKGASAQSFIERMTNFDKNLPNEKVLPKHSLLYEYFTVYNELTKVKYVTEGMRKPAFLSGEQKKAIVDLLFKTNRKVTVKQLKEDYFKKIECFDSVEISGVEDRFNASLGTYHDLLKIIKDKDFLDNEENEDILEDIVLTLTLFEDREMIEERLKTYAHLFDDKVMKQLKRRRYTGWGRLSRKLINGIRDKQSGKTILDFLKSDGFANRNFMQLIHDDSLTFKEDIQKAQVSGQGDSLHEHIANLAGSPAIKKGILQTVKVVDELVKVMGRHKPENIVIEMARENQTTQKGQKNSRERMKRIEEGIKELGSQILKEHPVENTQLQNEKLYLYYLQNGRDMYVDQELDINRLSDYDVDHIVPQSFLKDDSIDNKVLTRSDKNRGKSDNVPSEEVVKKMKNYWRQLLNAKLITQRKFDNLTKAERGGLSELDKAGFIKRQLVETRQITKHVAQILDSRMNTKYDENDKLIREVKVITLKSKLVSDFRKDFQFYKVREINNYHHAHDAYLNAVVGTALIKKYPKLESEFVYGDYKVYDVRKMIAKSEQEIGKATAKYFFYSNIMNFFKTEITLANGEIRKRPLIETNGETGEIVWDKGRDFATVRKVLSMPQVNIVKKTEVQTGGFSKESILPKRNSDKLIARKKDWDPKKYGGFVSPTVAYSVLVVAKVEKGKSKKLKSVKELLGITIMERSSFEKNPIDFLEAKGYKEVKKDLIIKLPKYSLFELENGRKRMLASARELQKGNELALPSKYVNFLYLASHYEKLKGSPEDNEQKQLFVEQHKHYLDEIIEQISEFSKRVILADANLDKVLSAYNKHRDKPIREQAENIIHLFTLTNLGAPAAFKYFDTTIDRKEYRSTKEVLDATLIHQSITGLYETRIDLSQLGGD

SEQ ID NO: 237 - protein, 1359 aa, Streptococcus macacae
  REGION 1..1359: note = MISC_FEATURE - SpyMacCas9 polypeptide sequence
MDKKYSIGLDIGTNSVGWAVITDDYKVPSKKFKVLGNTDRHSIKKNLIGALLFGSGETAEATRLKRTARRRYTRRKNRICYLQEIFSNEMAKVDDSFFHRLEESFLVEEDKKHERHPIFGNIVDEVAYHEKYPTIYHLRKKLADSTDKADLRLIYLALAHMIKFRGHFLIEGDLNPDNSDVDKLFIQLVQIYNQLFEENPINASRVDAKAILSARLSKSRRLENLIAQLPGEKRNGLFGNLIALSLGLTPNFKSNFDLAEDAKLQLSKDTYDDDLDNLLAQIGDQYADLFLAAKNLSDAILLSDILRVNSEITKAPLSASMIKRYDEHHQDLTLLKALVRQQLPEKYKEIFFDQSKNGYAGYIDGGASQEEFYKFIKPILEKMDGTEELLVKLNREDLLRKQRTFDNGSIPHQIHLGELHAILRRQEDFYPFLKDNREKIEKILTFRIPYYVGPLARGNSRFAWMTRKSEETITPWNFEEVVDKGASAQSFIERMTNFDKNLPNEKVLPKHSLLYEYFTVYNELTKVKYVTEGMRKPAFLSGEQKKAIVDLLFKTNRKVTVKQLKEDYFKKIECFDSVEISGVEDRFNASLGAYHDLLKIIKDKDFLDNEENEDILEDIVLTLTLFEDRGMIEERLKTYAHLFDDKVMKQLKRRRYTGWGRLSRKLINGIRDKQSGKTILDFLKSDGFANRNFMQLIHDDSLTFKEDIQKAQVSGQGHSLHEQIANLAGSPAIKKGILQTVKIVDELVKVMGHKPENIVIEMARENQTTQKGQKNSRERMKRIEEGIKELGSQILKEHPVENTQLQNEKLYLYYLQNGRDMYVDQELDINRLSDYDVDHIVPQSFIKDDSIDNKVLTRSDKNRGKSDNVPSEEVVKKMKNYWRQLLNAKLITQRKFDNLTKAERGGLSELDKAGFIKRQLVETRQITKHVAQILDSRMNTKYDENDKLIREVKVITLKSKLVSDFRKDFQFYKVREINNYHHAHDAYLNAVVGTALIKKYPKLESEFVYGDYKVYDVRKMIAKSEQEIGKATAKYFFYSNIMNFFKTEITLANGEIRKRPLIETNGETGEIVWDKGRDFATVRKVLSMPQVNIVKKTEIQTVGQNGGLFDDNPKSPLEVTPSKLVPLKKELNPKKYGGYQKPTTAYPVLLITDTKQLIPISVMNKKQFEQNPVKFLRDRGYQQVGKNDFIKLPKYTLVDIGDGIKRLWASSKEIHKGNQLVVSKKSQILLYHAHHLDSDLSNDYLQNHNQQFDVLFNEIISFSKKCKLGKEHIQKIENVYSNKKNSASIEELAESFIKLLGFTQLGATSPFNFLGVKLNQKQYKGKKDYILPCTEGTLIRQSITGLYETRVDLSKIGED

SEQ ID NO: 238 - protein, 1410 aa, synthetic construct
  REGION 1..1410: note = CP5 polypeptide sequence
  REGION 1..341: note = MISC_FEATURE - Sequence derived from Cas9
  REGION 342..362: note = MISC_FEATURE - Linker sequence
  REGION 363..1388: note = MISC_FEATURE - Sequence derived from Cas9
  REGION 1389..1410: note = MISC_FEATURE - Bipartite nuclear localization sequence
EIGKATAKYFFYSNIMNFFKTEITLANGEIRKRPLIETNGETGEIVWDKGRDFATVRKVLSMPQVNIVKKTEVQTGGFSKESILPKRNSDKLIARKKDWDPKKYGGFMQPTVAYSVLVVAKVEKGKSKKLKSVKELLGITIMERSSFEKNPIDFLEAKGYKEVKKDLIIKLPKYSLFELENGRKRMLASAKFLQKGNELALPSKYVNFLYLASHYEKLKGSPEDNEQKQLFVEQHKHYLDEIIEQISEFSKRVILADANLDKVLSAYNKHRDKPIREQAENIIHLFTLTNLGAPRAFKYFDTTIARKEYRSTKEVLDATLIHQSITGLYETRIDLSQLGGDGGSGGSGGSGGSGGSGGSGGMDKKYSIGLAIGTNSVGWAVITDEYKVPSKKFKVLGNTDRHSIKKNLIGALLFDSGETAEATRLKRTARRRYTRRKNRICYLQEIFSNEMAKVDDSFFHRLEESFLVEEDKKHERHPIFGNIVDEVAYHEKYPTIYHLRKKLVDSTDKADLRLIYLALAHMIKFRGHFLIEGDLNPDNSDVDKLFIQLVQTYNQLFEENPINASGVDAKAILSARLSKSRRLENLIAQLPGEKKNGLFGNLIALSLGLTPNFKSNFDLAEDAKLQLSKDTYDDDLDNLLAQIGDQYADLFLAAKNLSDAILLSDILRVNTEITKAPLSASMIKRYDEHHQDLTLLKALVRQQLPEKYKEIFFDQSKNGYAGYIDGGASQEEFYKFIKPILEKMDGTEELLVKLNREDLLRKQRTFDNGSIPHQIHLGELHAILRRQEDFYPFLKDNREKIEKILTFRIPYYVGPLARGNSRFAWMTRKSEETITPWNFEEVVDKGASAQSFIERMTNFDKNLPNEKVLPKHSLLYEYFTVYNELTKVKYVTEGMRKPAFLSGEQKKAIVDLLFKTNRKVTVKQLKEDYFKKIECFDSVEISGVEDRFNASLGTYHDLLKIIKDKDFLDNEENEDILEDIVLTLTLFEDREMIEERLKTYAHLFDDKVMKQLKRRRYTGWGRLSRKLINGIRDKQSGKTILDFLKSDGFANRNFMQLIHDDSLTFKEDIQKAQVSGQGDSLHEHIANLAGSPAIKKGILQTVKVVDELVKVMGRHKPENIVIEMARENQTTQKGQKNSRERMKRIEEGIKELGSQILKEHPVENTQLQNEKLYLYYLQNGRDMYVDQELDINRLSDYDVDHIVPQSFLKDDSIDNKVLTRSDKNRGKSDNVPSEEVVKKMKNYWRQLLNAKLITQRKFDNLTKAERGGLSELDKAGFIKRQLVETRQITKHVAQILDSRMNTKYDENDKLIREVKVITLKSKLVSDFRKDFQFYKVREINNYHHAHDAYLNAVVGTALIKKYPKLESEFVYGDYKVYDVRKMIAKSEQEGADKRTADGSEFESPKKKRKV

SEQ ID NO: 239 - protein, 1302 aa, synthetic construct
  REGION 1..1302: note = Cas12c1 polypeptide sequence
MQTKKTHLHLISAKASRKYRRTIACLSDTAKKDLERRKQSGAADPAQELSCLKTIKFKLEVPEGSKLPSFDRISQIYNALETIEKGSLSYLLFALILSGFRIFPNSSAAKTFASSSCYKNDQFASQIKEIFGEMVKNFIPSELESILKKGRRKNNKDWTEENIKRVLNSEFGRKNSEGSSALFDSFLSKFSQELFRKFDSWNEVNKKYLEAAELLDSMLASYGPFDSVCKMIGDSDSRNSLPDKSTIAFTNNAEITVDIESSVMPYMAIAALLREYRQSKSKAAPVAYVQSHLTTTNGNGLSWFFKFGLDLIRKAPVSSKQSTSDGSKSLQELFSVPDDKLDGLKFIKEACEALPEASLLCGEKGELLGYQDFRTSFAGHIDSWVANYVNRLFELIELVNQLPESIKLPSILTQKNHNLVASLGLQEAEVSHSLELFEGLVKNVRQTLKKLAGIDISSSPNEQDIKEFYAFSDVLNRLGSIRNQIENAVQTAKKDKIDLESAIEWKEWKKLKKLPKLNGLGGGVPKQQELLDKALESVKQIRHYQRIDFERVIQWAVNEHCLETVPKFLVDAEKKKINKESSTDFAAKENAVRFLLEGIGAAARGKTDSVSKAAYNWFVVNNFLAKKDLNRYFINCQGCIYKPPYSKRRSLAFALRSDNKDTIEVVWEKFETFYKEISKEIEKFNIFSQEFQTFLHLENLRMKLLLRRIQKPIPAEIAFFSLPQEYYDSLPPNVAFLALNQEITPSEYITQFNLYSSFLNGNLILLRRSRSYLRAKFSWVGNSKLIYAAKEARLWKIPNAYWKSDEWKMILDSNVLVFDKAGNVLPAPTLKKVCEREGDLRLFYPLLRQLPHDWCYRNPFVKSVGREKNVIEVNKEGEPKVASALPGSLFRLIGPAPFKSLLDDCFFNPLDKDLRECMLIVDQEISQKVEAQKVEASLESCTYSIAVPIRYHLEEPKVSNQFENVLAIDQGEAGLAYAVFSLKSIGEAETKPIAVGTIRIPSIRRLIHSVSTYRKKKQRLQNFKQNYDSTAFIMRENVTGDVCAKIVGLMKEFNAFPVLEYDVKNLESGSRQLSAVYKAVNSHFLYFKEPGRDALRKQLWYGGDSWTIDGIEIVTRERKEDGKEGVEKIVPLKVFPGRSVSARFTSKTCSCCGRNVFDWLFTEKKAKTNKKFNVNSKGELTTADGVIQLFEADRSKGPKFYARRKERTPLTKPIAKGSYSLEEIERRVRTNLRRAPKSKQSRDTSQSQYFCVYKDCALHFSGMQADENAAINIGRRFLTALRKNRRSDFPSNVKISDRLLDN

SEQ ID NO: 240 - protein, 1218 aa, synthetic construct
  REGION 1..1218: note = Cas12c2 polypeptide sequence
MTKHSIPLHAFRNSGADARKWKGRIALLAKRGKETMRTLQFPLEMSEPEAAAINTTPFAVAYNAIEGTGKGTLFDYWAKLHLAGFRFFPSGGAATIFRQQAVFEDASWNAAFCQQSGKDWPWLVPSKLYERFTKAPREVAKKDGSKKSIEFTQENVANESHVSLVGASITDKTPEDQKEFFLKMAGALAEKFDSWKSANEDRIVAMKVIDEFLKSEGLHLPSLENIAVKCSVETKPDNATVAWHDAPMSGVQNLAIGVFATCASRIDNIYDLNGGKLSKLIQESATTPNVTALSWLFGKGLEYFRTTDIDTIMQDFNIPASAKESIKPLVESAQAIPTMTVLGKKNYAPFRPNFGGKIDSWIANYASRLMLLNDILEQIEPGFELPQALLDNETLMSGIDMTGDELKELIEAVYAWVDAAKQGLATLLGRGGNVDDAVQTFEQFSAMMDTLNGTLNTISARYVRAVEMAGKDEARLEKLIECKFDIPKWCKSVPKLVGISGGLPKVEEEIKVMNAAFKDVRARMFVRFEEIAAYVASKGAGMDVYDALEKRELEQIKKLKSAVPERAHIQAYRAVLHRIGRAVQNCSEKTKQLFSSKVIEMGVFKNPSHLNNFIFNQKGAIYRSPFDRSRHAPYQLHADKLLKNDWLELLAEISATLMASESTEQMEDALRLERTRLQLQLSGLPDWEYPASLAKPDIEVEIQTALKMQLAKDTVTSDVLQRAFNLYSSVLSGLTFKLLRRSFSLKMRFSVADTTQLIYVPKVCDWAIPKQYLQAEGEIGIAARVVTESSPAKMVTEVEMKEPKALGHFMQQAPHDWYFDASLGGTQVAGRIVEKGKEVGKERKLVGYRMRGNSAYKTVLDKSLVGNTELSQCSMIIEIPYTQTVDADFRAQVQAGLPKVSINLPVKETITASNKDEQMLFDRFVAIDLGERGLGYAVFDAKTLELQESGHRPIKAITNLLNRTHHYEQRPNQRQKFQAKFNVNLSELRENTVGDVCHQINRICAYYNAFPVLEYMVPDRLDKQLKSVYESVTNRYIWSSTDAHKSARVQFWLGGETWEHPYLKSAKDKKPLVLSPGRGASGKGTSQTCSCCGRNPFDLIKDMKPRAKIAVVDGKAKLENSELKLFERNLESKDDMLARRHRNERAGMEQPLTPGNYTVDEIKALLRANLRRAPKNRRTKDTTVSEYHCVFSDCGKTMHADENAAVNIGGKFIADIEK

SEQ ID NO: 241 - protein, 1252 aa, Oleiphilus sp.
  REGION 1..1252: note = MISC_FEATURE - OspCas12c polypeptide sequence
MTKLRHRQKKLTHDWAGSKKREVLGSNGKLQNPLLMPVKKGQVTEFRKAFSAYARATKGEMTDGRKNMFTHSFEPFKTKPSLHQCELADKAYQSLHSYLPGSLAHFLLSAHALGFRIFSKSGEATAFQASSKIEAYESKLASELACVDLSIQNLTISTLFNALTTSVRGKGEETSADPLIARFYTLLTGKPLSRDTQGPERDLAEVISRKIASSFGTWKEMTANPLQSLQFFEEELHALDANVSLSPAFDVLIKMNDLQGDLKNRTIVFDPDAPVFEYNAEDPADIIIKLTARYAKEAVIKNQNVGNYVKNAITTTNANGLGWLLNKGLSLLPVSTDDELLEFIGVERSHPSCHALIELIAQLEAPELFEKNVFSDTRSEVQGMIDSAVSNHIARLSSSRNSLSMDSEELERLIKSFQIHTPHCSLFIGAQSLSQQLESLPEALQSGVNSADILLGSTQYMLTNSLVEESIATYQRTLNRINYLSGVAGQINGAIKRKAIDGEKIHLPAAWSELISLPFIGQPVIDVESDLAHLKNQYQTLSNEFDTLISALQKNFDLNFNKALLNRTQHFEAMCRSTKKNALSKPEIVSYRDLLARLTSCLYRGSLVLRRAGIEVLKKHKIFESNSELREHVHERKHFVFVSPLDRKAKKLLRLTDSRPDLLHVIDEILQHDNLENKDRESLWLVRSGYLLAGLPDQLSSSFINLPIITQKGDRRLIDLIQYDQINRDAFVMLVTSAFKSNLSGLQYRANKQSFVVTRTLSPYLGSKLVYVPKDKDWLVPSQMFEGRFADILQSDYMVWKDAGRLCVIDTAKHLSNIKKSVFSSEEVLAFLRELPHRTFIQTEVRGLGVNVDGIAFNNGDIPSLKTFSNCVQVKVSRTNTSLVQTLNRWFEGGKVSPPSIQFERAYYKKDDQIHEDAAKRKIRFQMPATELVHASDDAGWTPSYLLGIDPGEYGMGLSLVSINNGEVLDSGFIHINSLINFASKKSNHQTKVVPRQQYKSPYANYLEQSKDSAAGDIAHILDRLIYKLNALPVFEALSGNSQSAADQVWTKVLSFYTWGDNDAQNSIRKQHWFGASHWDIKGMLRQPPTEKKPKPYIAFPGSQVSSYGNSQRCSCCGRNPIEQLREMAKDTSIKELKIRNSEIQLFDGTIKLFNPDPSTVIERRRHNLGPSRIPVADRTFKNISPSSLEFKELITIVSRSIRHSPEFIAKKRGIGSEYFCAYSDCNSSLNSEANAAANVAQKFQKQLFFEL

SEQ ID NO: 242 - protein, 767 aa, synthetic construct
  REGION 1..767: note = Cas12g1 polypeptide sequence
MAQASSTPAVSPRPRPRYREERTLVRKLLPRPGQSKQEFRENVKKLRKAFLQFNADVSGVCQWAIQFRPRYGKPAEPTETFWKFFLEPETSLPPNDSRSPEFRRLQAFEAAAGINGAAALDDPAFTNELRDSILAVASRPKTKEAQRLFSRLKDYQPAHRMILAKVAAEWIESRYRRAHQNWERNYEEWKKEKQEWEQNHPELTPEIREAFNQIFQQLEVKEKRVRICPAARLLQNKDNCQYAGKNKHSVLCNQFNEFKKNHLQGKAIKFFYKDAEKYLRCGLQSLKPNVQGPFREDWNKYLRYMNLKEETLRGKNGGRLPHCKNLGQECEFNPHTALCKQYQQQLSSRPDLVQHDELYRKWRREYWREPRKPVFRYPSVKRHSIAKIFGENYFQADFKNSVVGLRLDSMPAGQYLEFAFAPWPRNYRPQPGETEISSVHLHFVGTRPRIGFRFRVPHKRSRFDCTQEELDELRSRTFPRKAQDQKFLEAARKRLLETFPGNAEQELRLLAVDLGTDSARAAFFIGKTFQQAFPLKIVKIEKLYEQWPNQKQAGDRRDASSKQPRPGLSRDHVGRHLQKMRAQASEIAQKRQELTGTPAPETTTDQAAKKATLQPFDLRGLTVHTARMIRDWARLNARQIIQLAEENQVDLIVLESLRGFRPPGYENLDQEKKRRVAFFAHGRIRRKVTEKAVERGMRVVTVPYLASSKVCAECRKKQKDNKQWEKNKKRGLFKCEGCGSQAQVDENAARVLGRVFWGEIELPTAIP

SEQ ID NO: 243 - protein, 870 aa, synthetic construct
  REGION 1..870: note = Cas12h1 polypeptide sequence
MKVHEIPRSQLLKIKQYEGSFVEWYRDLQEDRKKFASLLFRWAAFGYAAREDDGATYISPSQALLERRLLLGDAEDVAIKFLDVLFKGGAPSSSCYSLFYEDFALRDKAKYSGAKREFIEGLATMPLDKIIERIRQDEQLSKIPAEEWLILGAEYSPEEIWEQVAPRIVNVDRSLGKQLRERLGIKCRRPHDAGYCKILMEVVARQLRSHNETYHEYLNQTHEMKTKVANNLTNEFDLVCEFAEVLEEKNYGLGWYVLWQGVKQALKEQKKPTKIQIAVDQLRQPKFAGLLTAKWRALKGAYDTWKLKKRLEKRKAFPYMPNWDNDYQIPVGLTGLGVFTLEVKRTEVVVDLKEHGKLFCSHSHYFGDLTAEKHPSRYHLKFRHKLKLRKRDSRVEPTIGPWIEAALREITIQKKPNGVFYLGLPYALSHGIDNFQIAKRFFSAAKPDKEVINGLPSEMVVGAADLNLSNIVAPVKARIGKGLEGPLHALDYGYGELIDGPKILTPDGPRCGELISLKRDIVEIKSAIKEFKACQREGLTMSEETTTWLSEVESPSDSPRCMIQSRIADTSRRLNSFKYQMNKEGYQDLAEALRLLDAMDSYNSLLESYQRMHLSPGEQSPKEAKFDTKRASFRDLLRRRVAHTIVEYFDDCDIVFFEDLDGPSDSDSRNNALVKLLSPRTLLLYIRQALEKRGIGMVEVAKDGTSQNNPISGHVGWRNKQNKSEIYFYEDKELLVMDADEVGAMNILCRGLNHSVCPYSFVTKAPEKKNDEKKEGDYGKRVKRFLKDRYGSSNVRFLVASMGFVTVTTKRPKDALVGKRLYYHGGELVTHDLHNRMKDEIKYLVEKEVLARRVSLSDSTIKSYKSFAHV

SEQ ID NO: 244 - protein, 1093 aa, synthetic construct
  REGION 1..1093: note = Cas12i1 polypeptide sequence
MSNKEKNASETRKAYTTKMIPRSHDRMKLLGNFMDYLMDGTPIFFELWNQFGGGIDRDIISGTANKDKISDDLLLAVNWFKVMPINSKPQGVSPSNLANLFQQYSGSEPDIQAQEYFASNFDTEKHQWKDMRVEYERLLAELQLSRSDMHHDLKLMYKEKCIGLSLSTAHYITSVMFGTGAKNNRQTKHQFYSKVIQLLEESTQINSVEQLASIILKAGDCDSYRKLRIRCSRKGATPSILKIVQDYELGTNHDDEVNVPSLIANLKEKLGRFEYECEWKCMEKIKAFLASKVGPYYLGSYSAMLENALSPIKGMTTKNCKFVLKQIDAKNDIKYENEPFGKIVEGFFDSPYFESDTNVKWVLHPHHIGESNIKTLWEDLNAIHSKYEEDIASLSEDKKEKRIKVYQGDVCQTINTYCEEVGKEAKTPLVQLLRYLYSRKDDIAVDKIIDGITFLSKKHKVEKQKINPVIQKYPSFNFGNNSKLLGKIISPKDKLKHNLKCNRNQVDNYIWIEIKVLNTKTMRWEKHHYALSSTRFLEEVYYPATSENPPDALAARFRTKTNGYEGKPALSAEQIEQIRSAPVGLRKVKKRQMRLEAARQQNLLPRYTWGKDFNINICKRGNNFEVTLATKVKKKKEKNYKVVLGYDANIVRKNTYAAIEAHANGDGVIDYNDLPVKPIESGFVTVESQVRDKSYDQLSYNGVKLLYCKPHVESRRSFLEKYRNGTMKDNRGNNIQIDFMKDFEAIADDETSLYYFNMKYCKLLQSSIRNHSSQAKEYREEIFELLRDGKLSVLKLSSLSNLSFVMFKVAKSLIGTYFGHLLKKPKNSKSDVKAPPITDEDKQKADPEMFALRLALEEKRLNKVKSKKEVIANKIVAKALELRDKYGPVLIKGENISDTTKKGKKSSTNSFLMDWLARGVANKVKEMVMMHQGLEFVEVNPNFTSHQDPFVHKNPENTFRARYSRCTPSELTEKNRKEILSFLSDKPSKRPTNAYYNEGAMAFLATYGLKKNDVLGVSLEKFKQIMANILHQRSEDQLLFPSRGGMFYLATYKLDADATSVNWNGKQFWVCNADLVAAYNVGLVDIQKDFKKK

SEQ ID NO: 245 - protein, 1054 aa, synthetic construct
  REGION 1..1054: note = Cas12i2 polypeptide sequence
MSSAIKSYKSVLRPNERKNQLLKSTIQCLEDGSAFFFKMLQGLFGGITPEIVRFSTEQEKQQQDIALWCAVNWFRPVSQDSLTHTIASDNLVEKFEEYYGGTASDAIKQYFSASIGESYYWNDCRQQYYDLCRELGVEVSDLTHDLEILCREKCLAVATESNQNNSIISVLFGTGEKEDRSVKLRITKKILEAISNLKEIPKNVAPIQEIILNVAKATKETFRQVYAGNLGAPSTLEKFIAKDGQKEFDLKKLQTDLKKVIRGKSKERDWCCQEELRSYVEQNTIQYDLWAWGEMFNKAHTALKIKSTRNYNFAKQRLEQFKEIQSLNNLLVVKKLNDFFDSEFFSGEETYTICVHHLGGKDLSKLYKAWEDDPADPENAIVVLCDDLKNNFKKEPIRNILRYIFTIRQECSAQDILAAAKYNQQLDRYKSQKANPSVLGNQGFTWTNAVILPEKAQRNDRPNSLDLRIWLYLKLRHPDGRWKKHHIPFYDTRFFQEIYAAGNSPVDTCQFRTPRFGYHLPKLTDQTAIRVNKKHVKAAKTEARIRLAIQQGTLPVSNLKITEISATINSKGQVRIPVKFDVGRQKGTLQIGDRFCGYDQNQTASHAYSLWEVVKEGQYHKELGCFVRFISSGDIVSITENRGNQFDQLSYEGLAYPQYADWRKKASKFVSLWQITKKNKKKEIVTVEAKEKFDAICKYQPRLYKFNKEYAYLLRDIVRGKSLVELQQIRQEIFRFIEQDCGVTRLGSLSLSTLETVKAVKGIIYSYFSTALNASKNNPISDEQRKEFDPELFALLEKLELIRTRKKKQKVERIANSLIQTCLENNIKFIRGEGDLSTTNNATKKKANSRSMDWLARGVFNKIRQLAPMHNITLFGCGSLYTSHQDPLVHRNPDKAMKCRWAAIPVKDIGDWVLRKLSQNLRAKNIGTGEYYHQGVKEFLSHYELQDLEEELLKWRSDRKSNIPCWVLQNRLAEKLGNKEAVVYIPVRGGRIYFATHKVATGAVSIVFDQKQVWVCNADHVAAANIALTVKGIGEQSSDEENPDGSRIKLQLTS

SEQ ID NO: 246 - protein, 4 aa, synthetic construct
  REGION 1..4: note = synthetic peptide sequence
GGGS

SEQ ID NO: 247 - protein, 5 aa, synthetic construct
  REGION 1..5: note = synthetic peptide sequence
GGGGS

SEQ ID NO: 248 - protein, 5 aa, synthetic construct
  REGION 1..5: note = synthetic peptide sequence
EAAAK

SEQ ID NO: 249 - protein, 16 aa, synthetic construct
  REGION 1..16: note = synthetic peptide sequence
SGSETPGTSESATPES

SEQ ID NO: 250 - protein, 6 aa, synthetic construct
  REGION 1..6: note = linker peptide sequence
GGSGGS

SEQ ID NO: 251 - protein, 20 aa, synthetic construct
  REGION 1..20: note = synthetic peptide sequence
GSSGSETPGTSESATPESSG

SEQ ID NO: 252 - DNA, 18 bp, synthetic construct
  misc_feature 1..18: note = synthetic oligonucleotide sequence
  source 1..18: mol_type = other DNA
ggaggctctggaggaagc

SEQ ID NO: 253 - DNA, 60 bp, synthetic construct
  misc_feature 1..60: note = synthetic oligonucleotide sequence
  source 1..60: mol_type = other DNA
ggctcttctggatctgaaacacctggcacaagcgagagcgccacccctgagagctctggc

SEQ ID NO: 254 - protein, 1129 aa, Alicyclobacillus acidiphilus
  REGION 1..1129: note = MISC_FEATURE - AacCas12b polypeptide sequence
MAVKSMKVKLRLDNMPEIRAGLWKLHTEVNAGVRYYTEWLSLLRQENLYRRSPNGDGEQECYKTAEECKAELLERLRARQVENGHCGPAGSDDELLQLARQLYELLVPQAIGAKGDAQQIARKFLSPLADKDAVGGLGIAKAGNKPRWVRMREAGEPGWEEEKAKAEARKSTDRTADVLRALADFGLKPLMRVYTDSDMSSVQWKPLRKGQAVRTWDRDMFQQAIERMMSWESWNQRVGEAYAKLVEQKSRFEQKNFVGQEHLVQLVNQLQQDMKEASHGLESKEQTAHYLTGRALRGSDKVFEKWEKLDPDAPFDLYDTEIKNVQRRNTRRFGSHDLFAKLAEPKYQALWREDASFLTRYAVYNSIVRKLNHAKMFATFTLPDATAHPIWTRFDKLGGNLHQYTFLFNEFGEGRHAIRFQKLLTVEDGVAKEVDDVTVPISMSAQLDDLLPRDPHELVALYFQDYGAEQHLAGEFGGAKIQYRRDQLNHLHARRGARDVYLNLSVRVQSQSEARGERRPPYAAVFRLVGDNHRAFVHFDKLSDYLAEHPDDGKLGSEGLLSGLRVMSVDLGLRTSASISVFRVARKDELKPNSEGRVPFCFPIEGNENLVAVHERSQLLKLPGETESKDLRAIREERQRTLRQLRTQLAYLRLLVRCGSEDVGRRERSWAKLIEQPMDANQMTPDWREAFEDELQKLKSLYGICGDREWTEAVYESVRRVWRHMGKQVRDWRKDVRSGERPKIRGYQKDVVGGNSIEQIEYLERQYKFLKSWSFFGKVSGQVIRAEKGSRFAITLREHIDHAKEDRLKKLADRIIMEALGYVYALDDERGKGKWVAKYPPCQLILLEELSEYQFNNDRPPSENNQLMQWSHRGVFQELLNQAQVHDLLVGTMYAAFSSRFDARTGAPGIRCRRVPARCAREQNPEPFPWWLNKFVAEHKLDGCPLRADDLIPTGEGEFFVSPFSAEEGDFHQIHADLNAAQNLQRRLWSDFDISQIRLRCDWGEVDGEPVLIPRTTGKRTADSYGNKVFYTKTGVTYYERERGKKRRKVFAQEELSEEEAELLVEADEAREKSVVLMRDPSGIINRGDWTRQKEFWSMVNQRIEGYLVKQIRSRVRLQESACENTGDI

SEQ ID NO: 255 - protein, 1140 aa, Bacillus hisashii
  REGION 1..1140: note = MISC_FEATURE - BhCas12b polypeptide sequence
MAPKKKRKVGIHGVPAAATRSFILKIEPNEEVKKGLWKTHEVLNHGIAYYMNILKLIRQEAIYEHHEQDPKNPKKVSKAEIQAELWDFVLKMQKCNSFTHEVDKDEVFNILRELYEELVPSSVEKKGEANQLSNKFLYPLVDPNSQSGKGTASSGRKPRWYNLKIAGDPSWEEEKKKWEEDKKKDPLAKILGKLAEYGLIPLFIPYTDSNEPIVKEIKWMEKSRNQSVRRLDKDMFIQALERFLSWESWNLKVKEEYEKVEKEYKTLEERIKEDIQALKALEQYEKERQEQLLRDTLNTNEYRLSKRGLRGWREIIQKWLKMDENEPSEKYLEVFKDYQRKHPREAGDYSVYEFLSKKENHFIWRNHPEYPYLYATFCEIDKKKKDAKQQATFTLADPINHPLWVRFEERSGSNLNKYRILTEQLHTEKLKKKLTVQLDRLIYPTESGGWEEKGKVDIVLLPSRQFYNQIFLDIEEKGKHAFTYKDESIKFPLKGTLGGARVQFDRDHLRRYPHKVESGNVGRIYFNMTVNIEPTESPVSKSLKIHRDDFPKVVNFKPKELTEWIKDSKGKKLKSGIESLEIGLRVMSIDLGQRQAAAASIFEVVDQKPDIEGKLFFPIKGTELYAVHRASFNIKLPGETLVKSREVLRKAREDNLKLMNQKLNFLRNVLHFQQFEDITEREKRVTKWISRQENSDVPLVYQDELIQIRELMYKPYKDWVAFLKQLHKRLEVEIGKEVKHWRKSLSDGRKGLYGISLKNIDEIDRTRKFLLRWSLRPTEPGEVRRLEPGQRFAIDQLNHLNALKEDRLKKMANTIIMHALGYCYDVRKKKWQAKNPACQIILFEDLSNYNPYEERSRFENSKLMKWSRREIPRQVALQGEIYGLQVGEVGAQFSSRFHAKTGSPGIRCSVVTKEKLQDNRFFKNLQREGRLTLDKIAVLKEGDLYPDKGGEKFISLSKDRKCVTTHADINAAQNLQKRFWTRTHGFYKVYCKAYQVDGQTVYIPESKDQKQKIIEEFGEGYFILKDGVYEWVNAGKLKIKKGSSKQSSSELVDSDILKDSFDLASELKGEKLMLYRDPSGNVFPSDKWMAAGVFFGKLERILISKLTNQYSISTIEDDSSKQSMKRPAATKKAGQAKKKK

SEQ ID NO: 256 - protein, 1108 aa, Bacillus thermoamylovorans
  REGION 1..1108: note = MISC_FEATURE - BTCas12b polypeptide sequence
MATRSFILKIEPNEEVKKGLWKTHEVLNHGIAYYMNILKLIRQEAIYEHHEQDPKNPKKVSKAEIQAELWDFVLKMQKCNSFTHEVDKDVVFNILRELYEELVPSSVEKKGEANQLSNKFLYPLVDPNSQSGKGTASSGRKPRWYNLKIAGDPSWEEEKKKWEEDKKKDPLAKILGKLAEYGLIPLFIPFTDSNEPIVKEIKWMEKSRNQSVRRLDKDMFIQALERFLSWESWNLKVKEEYEKVEKEHKTLEERIKEDIQAFKSLEQYEKERQEQLLRDTLNTNEYRLSKRGLRGWREIIQKWLKMDENEPSEKYLEVFKDYQRKHPREAGDYSVYEFLSKKENHFIWRNHPEYPYLYATFCEIDKKKKDAKQQATFTLADPINHPLWVRFEERSGSNLNKYRILTEQLHTEKLKKKLTVQLDRLIYPTESGGWEEKGKVDIVLLPSRQFYNQIFLDIEEKGKHAFTYKDESIKFPLKGTLGGARVQFDRDHLRRYPHKVESGNVGRIYFNMTVNIEPTESPVSKSLKIHRDDFPKFVNFKPKELTEWIKDSKGKKLKSGIESLEIGLRVMSIDLGQRQAAAASIFEVVDQKPDIEGKLFFPIKGTELYAVHRASFNIKLPGETLVKSREVLRKAREDNLKLMNQKLNFLRNVLHFQQFEDITEREKRVTKWISRQENSDVPLVYQDELIQIRELMYKPYKDWVAFLKQLHKRLEVEIGKEVKHWRKSLSDGRKGLYGISLKNIDEIDRTRKFLLRWSLRPTEPGEVRRLEPGQRFAIDQLNHLNALKEDRLKKMANTIIMHALGYCYDVRKKKWQAKNPACQIILFEDLSNYNPYEERSRFENSKLMKWSRREIPRQVALQGEIYGLQVGEVGAQFSSRFHAKTGSPGIRCSVVTKEKLQDNRFFKNLQREGRLTLDKIAVLKEGDLYPDKGGEKFISLSKDRKLVTTHADINAAQNLQKRFWTRTHGFYKVYCKAYQVDGQTVYIPESKDQKQKIIEEFGEGYFILKDGVYEWGNAGKLKIKKGSSKQSSSELVDSDILKDSFDLASELKGEKLMLYRDPSGNVFPSDKWMAAGVFFGKLERILISKLTNQYSISTIEDDSSKQSM

SEQ ID NO: 257 - protein, 1112 aa, Bacillus sp.
  REGION 1..1112: note = MISC_FEATURE - BvCas12b (Bacillus sp. V3-13) polypeptide sequence
MAIRSIKLKMKTNSGTDSIYLRKALWRTHQLINEGIAYYMNLLTLYRQEAIGDKTKEAYQAELINIIRNQQRNNGSSEEHGSDQEILALLRQLYELIIPSSIGESGDANQLGNKFLYPLVDPNSQSGKGTSNAGRKPRWKRLKEEGNPDWELEKKKDEERKAKDPTVKIFDNLNKYGLLPLFPLFTNIQKDIEWLPLGKRQSVRKWDKDMFIQAIERLLSWESWNRRVADEYKQLKEKTESYYKEHLTGGEEWIEKIRKFEKERNMELEKNAFAPNDGYFITSRQIRGWDRVYEKWSKLPESASPEELWKVVAEQQNKMSEGFGDPKVFSFLANRENRDIWRGHSERIYHIAAYNGLQKKLSRTKEQATFTLPDAIEHPLWIRYESPGGTNLNLFKLEEKQKKNYYVTLSKIIWPSEEKWIEKENIEIPLAPSIQFNRQIKLKQHVKGKQEISFSDYSSRISLDGVLGGSRIQFNRKYIKNHKELLGEGDIGPVFFNLVVDVAPLQETRNGRLQSPIGKALKVISSDFSKVIDYKPKELMDWMNTGSASNSFGVASLLEGMRVMSIDMGQRTSASVSIFEVVKELPKDQEQKLFYSINDTELFAIHKRSFLLNLPGEVVTKNNKQQRQERRKKRQFVRSQIRMLANVLRLETKKTPDERKKAIHKLMEIVQSYDSWTASQKEVWEKELNLLTNMAAFNDEIWKESLVELHHRIEPYVGQIVSKWRKGLSEGRKNLAGISMWNIDELEDTRRLLISWSKRSRTPGEANRIETDEPFGSSLLQHIQNVKDDRLKQMANLIIMTALGFKYDKEEKDRYKRWKETYPACQIILFENLNRYLFNLDRSRRENSRLMKWAHRSIPRTVSMQGEMFGLQVGDVRSEYSSRFHAKTGAPGIRCHALTEEDLKAGSNTLKRLIEDGFINESELAYLKKGDIIPSQGGELFVTLSKRYKKDSDNNELTVIHADINAAQNLQKRFWQQNSEVYRVPCQLARMGEDKLYIPKSQTETIKKYFGKGSFVKNNTEQEVYKWEKSEKMKIKTDTTFDLQDLDGFEDISKTIELAQEQQKKYLTMFRDPSGYFFNNETWRPQKEYWSIVNNIIKSCLKKKILSNKVEL

SEQ ID NO: 258 - DNA, 47 bp, synthetic construct
  misc_feature 1..47: note = 5'UTR oligonucleotide sequence
  source 1..47: mol_type = other DNA
gggaaataagagagaaaagaagagtaagaagaaatataagagccacc

SEQ ID NO: 259 - DNA, 101 bp, synthetic construct
  misc_feature 1..101: note = 3'UTR (TriLink standard UTR)polynucleotide sequence
  source 1..101: mol_type = other DNA
gctggagcctcggtggccatgcttcttgccccttgggcctccccccagcccctcctccccttcctgcacccgtacccccgtggtctttgaataaagtctga

SEQ ID NO: 260 - DNA, 3420 bp, Bacillus hisashii
  misc_feature 1..3420: note = bhCas12b (V4) polynucleotide sequence
  source 1..3420: mol_type = genomic DNA
atggccccaaagaagaagcggaaggtcggtatccacggagtcccagcagccgccaccagatccttcatcctgaagatcgagcccaacgaggaagtgaagaaaggcctctggaaaacccacgaggtgctgaaccacggaatcgcctactacatgaatatcctgaagctgatccggcaagaggccatctacgagcaccacgagcaggaccccaagaatcccaagaaggtgtccaaggccgagatccaggccgagctgtgggatttcgtgctgaagatgcagaagtgcaacagcttcacacacgaggtggacaaggacgaggtgttcaacatcctgagagagctgtacgaggaactggtgcccagcagcgtggaaaagaagggcgaagccaaccagctgagcaacaagtttctgtaccctctggtggaccccaacagccagtctggaaagggaacagccagcagcggcagaaagcccagatggtacaacctgaagattgccggcgatccctcctgggaagaagagaagaagaagtgggaagaagataagaaaaaggacccgctggccaagatcctgggcaagctggctgagtacggactgatccctctgttcatcccctacaccgacagcaacgagcccatcgtgaaagaaatcaagtggatggaaaagtcccggaaccagagcgtgcggcggctggataaggacatgttcattcaggccctggaacggttcctgagctgggagagctggaacctgaaagtgaaagaggaatacgagaaggtcgagaaagagtacaagaccctggaagagaggatcaaagaggacatccaggctctgaaggctctggaacagtatgagaaagagcggcaagaacagctgctgcgggacaccctgaacaccaacgagtaccggctgagcaagagaggccttagaggctggcgggaaatcatccagaaatggctgaaaatggacgagaacgagccctccgagaagtacctggaagtgttcaaggactaccagcggaagcaccctagagaggccggcgattacagcgtgtacgagttcctgtccaagaaagagaaccacttcatctggcggaatcaccctgagtacccctacctgtacgccaccttctgcgagatcgacaagaaaaagaaggacgccaagcagcaggccaccttcacactggccgatcctatcaatcaccctctgtgggtccgattcgaggaaagaagcggcagcaacctgaacaagtacagaatcctgaccgagcagctgcacaccgagaagctgaagaaaaagctgacagtgcagctggaccggctgatctaccctacagaatctggcggctgggaagagaagggcaaagtggacattgtgctgctgcccagccggcagttctacaaccagatcttcctggacatcgaggaaaagggcaagcacgccttcacctacaaggatgagagcatcaagttccctctgaagggcacactcggcggagccagagtgcagttcgacagagatcacctgagaagataccctcacaaggtggaaagcggcaacgtgggcagaatctacttcaacatgaccgtgaacatcgagcctacagagtccccagtgtccaagtctctgaagatccaccgggacgacttccccaaggtggtcaacttcaagcccaaagaactgaccgagtggatcaaggacagcaagggcaagaaactgaagtccggcatcgagtccctggaaatcggcctgagagtgatgagcatcgacctgggacagagacaggccgctgccgcctctattttcgaggtggtggatcagaagcccgacatcgaaggcaagctgtttttcccaatcaagggcaccgagctgtatgccgtgcacagagccagcttcaacatcaagctgcccggcgagacactggtcaagagcagagaagtgctgcggaaggccagagaggacaatctgaaactgatgaaccagaagctcaacttcctgcggaacgtgctgcacttccagcagttcgaggacatcaccgagagagagaagcgggtcaccaagtggatcagcagacaagagaacagcgacgtgcccctggtgtaccaggatgagctgatccagatccgcgagctgatgtacaagccttacaaggactgggtcgccttcctgaagcagctccacaagagactggaagtcgagatcggcaaagaagtgaagcactggcggaagtccctgagcgacggaagaaagggcctgtacggcatctccctgaagaacatcgacgagatcgatcggacccggaagttcctgctgagatggtccctgaggcctaccgaacctggcgaagtgcgtagactggaacccggccagagattcgccatcgaccagctgaatcacctgaacgccctgaaagaagatcggctgaagaagatggccaacaccatcatcatgcacgccctgggctactgctacgacgtgcggaagaagaaatggcaggctaagaaccccgcctgccagatcatcctgttcgaggatctgagcaactacaacccctacgaggaaaggtcccgcttcgagaacagcaagctcatgaagtggtccagacgcgagatccccagacaggttgcactgcagggcgagatctatggcctgcaagtgggagaagtgggcgctcagttcagcagcagattccacgccaagacaggcagccctggcatcagatgtagcgtcgtgaccaaagagaagctgcaggacaatcggttcttcaagaatctgcagagagagggcagactgaccctggacaaaatcgccgtgctgaaagagggcgatctgtacccagacaaaggcggcgagaagttcatcagcctgagcaaggatcggaagtgcgtgaccacacacgccgacatcaacgccgctcagaacctgcagaagcggttctggacaagaacccacggcttctacaaggtgtactgcaaggcctaccaggtggacggccagaccgtgtacatccctgagagcaaggaccagaagcagaagatcatcgaagagttcggcgagggctacttcattctgaaggacggggtgtacgaatgggtcaacgccggcaagctgaaaatcaagaagggcagctccaagcagagcagcagcgagctggtggatagcgacatcctgaaagacagcttcgacctggcctccgagctgaaaggcgaaaagctgatgctgtacagggaccccagcggcaatgtgttccccagcgacaaatggatggccgctggcgtgttcttcggaaagctggaacgcatcctgatcagcaagctgaccaaccagtactccatcagcaccatcgaggacgacagcagcaagcagtctatgaaaaggccggcggccacgaaaaaggccggccaggcaaaaaagaaaaag

SEQ ID NO: 261 - protein, 17 aa, synthetic construct
  REGION 1..17: note = synthetic peptide sequence
MAPKKKRKVGIHGVPAA

SEQ ID NO: 262 - DNA, 51 bp, synthetic construct
  misc_feature 1..51: note = synthetic oligonucleotide sequence
  source 1..51: mol_type = other DNA
atggccccaaagaagaagcggaaggtcggtatccacggagtcccagcagcc

SEQ ID NO: 263 - protein, 1554 aa, synthetic construct
  REGION 1..1554: note = 101 Cas9 TadAins 1015 polypeptide sequence
MDKKYSIGLAIGTNSVGWAVITDEYKVPSKKFKVLGNTDRHSIKKNLIGALLFDSGETAEATRLKRTARRRYTRRKNRICYLQEIFSNEMAKVDDSFFHRLEESFLVEEDKKHERHPIFGNIVDEVAYHEKYPTIYHLRKKLVDSTDKADLRLIYLALAHMIKFRGHFLIEGDLNPDNSDVDKLFIQLVQTYNQLFEENPINASGVDAKAILSARLSKSRRLENLIAQLPGEKKNGLFGNLIALSLGLTPNFKSNFDLAEDAKLQLSKDTYDDDLDNLLAQIGDQYADLFLAAKNLSDAILLSDILRVNTEITKAPLSASMIKRYDEHHQDLTLLKALVRQQLPEKYKEIFFDQSKNGYAGYIDGGASQEEFYKFIKPILEKMDGTEELLVKLNREDLLRKQRTFDNGSIPHQIHLGELHAILRRQEDFYPFLKDNREKIEKILTFRIPYYVGPLARGNSRFAWMTRKSEETITPWNFEEVVDKGASAQSFIERMTNFDKNLPNEKVLPKHSLLYEYFTVYNELTKVKYVTEGMRKPAFLSGEQKKAIVDLLFKTNRKVTVKQLKEDYFKKIECFDSVEISGVEDRFNASLGTYHDLLKIIKDKDFLDNEENEDILEDIVLTLTLFEDREMIEERLKTYAHLFDDKVMKQLKRRRYTGWGRLSRKLINGIRDKQSGKTILDFLKSDGFANRNFMQLIHDDSLTFKEDIQKAQVSGQGDSLHEHIANLAGSPAIKKGILQTVKVVDELVKVMGRHKPENIVIEMARENQTTQKGQKNSRERMKRIEEGIKELGSQILKEHPVENTQLQNEKLYLYYLQNGRDMYVDQELDINRLSDYDVDHIVPQSFLKDDSIDNKVLTRSDKNRGKSDNVPSEEVVKKMKNYWRQLLNAKLITQRKFDNLTKAERGGLSELDKAGFIKRQLVETRQITKHVAQILDSRMNTKYDENDKLIREVKVITLKSKLVSDFRKDFQFYKVREINNYHHAHDAYLNAVVGTALIKKYPKLESEFVYGDYKVGSSGSETPGTSESATPESSGSEVEFSHEYWMRHALTLAKRARDEREVPVGAVLVLNNRVIGEGWNRAIGLHDPTAHAEIMALRQGGLVMQNYRLIDATLYVTFEPCVMCAGAMIHSRIGRVVFGVRNAKTGAAGSLMDVLHYPGMNHRVEITEGILADECAALLCYFFRMPRQVFNAQKKAQSSTDYDVRKMIAKSEQEIGKATAKYFFYSNIMNFFKTEITLANGEIRKRPLIETNGETGEIVWDKGRDFATVRKVLSMPQVNIVKKTEVQTGGFSKESILPKRNSDKLIARKKDWDPKKYGGFDSPTVAYSVLVVAKVEKGKSKKLKSVKELLGITIMERSSFEKNPIDFLEAKGYKEVKKDLIIKLPKYSLFELENGRKRMLASAGELQKGNELALPSKYVNFLYLASHYEKLKGSPEDNEQKQLFVEQHKHYLDEIIEQISEFSKRVILADANLDKVLSAYNKHRDKPIREQAENIIHLFTLTNLGAPAAFKYFDTTIDRKRYTSTKEVLDATLIHQSITGLYETRIDLSQLGGD

SEQ ID NO: 264 - protein, 1554 aa, synthetic construct
  REGION 1..1554: note = 102 Cas9 TadAins 1022 polypeptide sequence
MDKKYSIGLAIGTNSVGWAVITDEYKVPSKKFKVLGNTDRHSIKKNLIGALLFDSGETAEATRLKRTARRRYTRRKNRICYLQEIFSNEMAKVDDSFFHRLEESFLVEEDKKHERHPIFGNIVDEVAYHEKYPTIYHLRKKLVDSTDKADLRLIYLALAHMIKFRGHFLIEGDLNPDNSDVDKLFIQLVQTYNQLFEENPINASGVDAKAILSARLSKSRRLENLIAQLPGEKKNGLFGNLIALSLGLTPNFKSNFDLAEDAKLQLSKDTYDDDLDNLLAQIGDQYADLFLAAKNLSDAILLSDILRVNTEITKAPLSASMIKRYDEHHQDLTLLKALVRQQLPEKYKEIFFDQSKNGYAGYIDGGASQEEFYKFIKPILEKMDGTEELLVKLNREDLLRKQRTFDNGSIPHQIHLGELHAILRRQEDFYPFLKDNREKIEKILTFRIPYYVGPLARGNSRFAWMTRKSEETITPWNFEEVVDKGASAQSFIERMTNFDKNLPNEKVLPKHSLLYEYFTVYNELTKVKYVTEGMRKPAFLSGEQKKAIVDLLFKTNRKVTVKQLKEDYFKKIECFDSVEISGVEDRFNASLGTYHDLLKIIKDKDFLDNEENEDILEDIVLTLTLFEDREMIEERLKTYAHLFDDKVMKQLKRRRYTGWGRLSRKLINGIRDKQSGKTILDFLKSDGFANRNFMQLIHDDSLTFKEDIQKAQVSGQGDSLHEHIANLAGSPAIKKGILQTVKVVDELVKVMGRHKPENIVIEMARENQTTQKGQKNSRERMKRIEEGIKELGSQILKEHPVENTQLQNEKLYLYYLQNGRDMYVDQELDINRLSDYDVDHIVPQSFLKDDSIDNKVLTRSDKNRGKSDNVPSEEVVKKMKNYWRQLLNAKLITQRKFDNLTKAERGGLSELDKAGFIKRQLVETRQITKHVAQILDSRMNTKYDENDKLIREVKVITLKSKLVSDFRKDFQFYKVREINNYHHAHDAYLNAVVGTALIKKYPKLESEFVYGDYKVYDVRKMIGSSGSETPGTSESATPESSGSEVEFSHEYWMRHALTLAKRARDEREVPVGAVLVLNNRVIGEGWNRAIGLHDPTAHAEIMALRQGGLVMQNYRLIDATLYVTFEPCVMCAGAMIHSRIGRVVFGVRNAKTGAAGSLMDVLHYPGMNHRVEITEGILADECAALLCYFFRMPRQVFNAQKKAQSSTDAKSEQEIGKATAKYFFYSNIMNFFKTEITLANGEIRKRPLIETNGETGEIVWDKGRDFATVRKVLSMPQVNIVKKTEVQTGGFSKESILPKRNSDKLIARKKDWDPKKYGGFDSPTVAYSVLVVAKVEKGKSKKLKSVKELLGITIMERSSFEKNPIDFLEAKGYKEVKKDLIIKLPKYSLFELENGRKRMLASAGELQKGNELALPSKYVNFLYLASHYEKLKGSPEDNEQKQLFVEQHKHYLDEIIEQISEFSKRVILADANLDKVLSAYNKHRDKPIREQAENIIHLFTLTNLGAPAAFKYFDTTIDRKRYTSTKEVLDATLIHQSITGLYETRIDLSQLGGD

SEQ ID NO: 265 - protein, 1554 aa, synthetic construct
  REGION 1..1554: note = 103 Cas9 TadAins 1029 polypeptide sequence
MDKKYSIGLAIGTNSVGWAVITDEYKVPSKKFKVLGNTDRHSIKKNLIGALLFDSGETAEATRLKRTARRRYTRRKNRICYLQEIFSNEMAKVDDSFFHRLEESFLVEEDKKHERHPIFGNIVDEVAYHEKYPTIYHLRKKLVDSTDKADLRLIYLALAHMIKFRGHFLIEGDLNPDNSDVDKLFIQLVQTYNQLFEENPINASGVDAKAILSARLSKSRRLENLIAQLPGEKKNGLFGNLIALSLGLTPNFKSNFDLAEDAKLQLSKDTYDDDLDNLLAQIGDQYADLFLAAKNLSDAILLSDILRVNTEITKAPLSASMIKRYDEHHQDLTLLKALVRQQLPEKYKEIFFDQSKNGYAGYIDGGASQEEFYKFIKPILEKMDGTEELLVKLNREDLLRKQRTFDNGSIPHQIHLGELHAILRRQEDFYPFLKDNREKIEKILTFRIPYYVGPLARGNSRFAWMTRKSEETITPWNFEEVVDKGASAQSFIERMTNFDKNLPNEKVLPKHSLLYEYFTVYNELTKVKYVTEGMRKPAFLSGEQKKAIVDLLFKTNRKVTVKQLKEDYFKKIECFDSVEISGVEDRFNASLGTYHDLLKIIKDKDFLDNEENEDILEDIVLTLTLFEDREMIEERLKTYAHLFDDKVMKQLKRRRYTGWGRLSRKLINGIRDKQSGKTILDFLKSDGFANRNFMQLIHDDSLTFKEDIQKAQVSGQGDSLHEHIANLAGSPAIKKGILQTVKVVDELVKVMGRHKPENIVIEMARENQTTQKGQKNSRERMKRIEEGIKELGSQILKEHPVENTQLQNEKLYLYYLQNGRDMYVDQELDINRLSDYDVDHIVPQSFLKDDSIDNKVLTRSDKNRGKSDNVPSEEVVKKMKNYWRQLLNAKLITQRKFDNLTKAERGGLSELDKAGFIKRQLVETRQITKHVAQILDSRMNTKYDENDKLIREVKVITLKSKLVSDFRKDFQFYKVREINNYHHAHDAYLNAVVGTALIKKYPKLESEFVYGDYKVYDVRKMIAKSEQEIGSSGSETPGTSESATPESSGSEVEFSHEYWMRHALTLAKRARDEREVPVGAVLVLNNRVIGEGWNRAIGLHDPTAHAEIMALRQGGLVMQNYRLIDATLYVTFEPCVMCAGAMIHSRIGRVVFGVRNAKTGAAGSLMDVLHYPGMNHRVEITEGILADECAALLCYFFRMPRQVFNAQKKAQSSTDGKATAKYFFYSNIMNFFKTEITLANGEIRKRPLIETNGETGEIVWDKGRDFATVRKVLSMPQVNIVKKTEVQTGGFSKESILPKRNSDKLIARKKDWDPKKYGGFDSPTVAYSVLVVAKVEKGKSKKLKSVKELLGITIMERSSFEKNPIDFLEAKGYKEVKKDLIIKLPKYSLFELENGRKRMLASAGELQKGNELALPSKYVNFLYLASHYEKLKGSPEDNEQKQLFVEQHKHYLDEIIEQISEFSKRVILADANLDKVLSAYNKHRDKPIREQAENIIHLFTLTNLGAPAAFKYFDTTIDRKRYTSTKEVLDATLIHQSITGLYETRIDLSQLGGD

SEQ ID NO: 266 - protein, 1554 aa, synthetic construct
  REGION 1..1554: note = 103 Cas9 TadAins 1040 polypeptide sequence
MDKKYSIGLAIGTNSVGWAVITDEYKVPSKKFKVLGNTDRHSIKKNLIGALLFDSGETAEATRLKRTARRRYTRRKNRICYLQEIFSNEMAKVDDSFFHRLEESFLVEEDKKHERHPIFGNIVDEVAYHEKYPTIYHLRKKLVDSTDKADLRLIYLALAHMIKFRGHFLIEGDLNPDNSDVDKLFIQLVQTYNQLFEENPINASGVDAKAILSARLSKSRRLENLIAQLPGEKKNGLFGNLIALSLGLTPNFKSNFDLAEDAKLQLSKDTYDDDLDNLLAQIGDQYADLFLAAKNLSDAILLSDILRVNTEITKAPLSASMIKRYDEHHQDLTLLKALVRQQLPEKYKEIFFDQSKNGYAGYIDGGASQEEFYKFIKPILEKMDGTEELLVKLNREDLLRKQRTFDNGSIPHQIHLGELHAILRRQEDFYPFLKDNREKIEKILTFRIPYYVGPLARGNSRFAWMTRKSEETITPWNFEEVVDKGASAQSFIERMTNFDKNLPNEKVLPKHSLLYEYFTVYNELTKVKYVTEGMRKPAFLSGEQKKAIVDLLFKTNRKVTVKQLKEDYFKKIECFDSVEISGVEDRFNASLGTYHDLLKIIKDKDFLDNEENEDILEDIVLTLTLFEDREMIEERLKTYAHLFDDKVMKQLKRRRYTGWGRLSRKLINGIRDKQSGKTILDFLKSDGFANRNFMQLIHDDSLTFKEDIQKAQVSGQGDSLHEHIANLAGSPAIKKGILQTVKVVDELVKVMGRHKPENIVIEMARENQTTQKGQKNSRERMKRIEEGIKELGSQILKEHPVENTQLQNEKLYLYYLQNGRDMYVDQELDINRLSDYDVDHIVPQSFLKDDSIDNKVLTRSDKNRGKSDNVPSEEVVKKMKNYWRQLLNAKLITQRKFDNLTKAERGGLSELDKAGFIKRQLVETRQITKHVAQILDSRMNTKYDENDKLIREVKVITLKSKLVSDFRKDFQFYKVREINNYHHAHDAYLNAVVGTALIKKYPKLESEFVYGDYKVYDVRKMIAKSEQEIGKATAKYFFYSGSSGSETPGTSESATPESSGSEVEFSHEYWMRHALTLAKRARDEREVPVGAVLVLNNRVIGEGWNRAIGLHDPTAHAEIMALRQGGLVMQNYRLIDATLYVTFEPCVMCAGAMIHSRIGRVVFGVRNAKTGAAGSLMDVLHYPGMNHRVEITEGILADECAALLCYFFRMPRQVFNAQKKAQSSTDNIMNFFKTEITLANGEIRKRPLIETNGETGEIVWDKGRDFATVRKVLSMPQVNIVKKTEVQTGGFSKESILPKRNSDKLIARKKDWDPKKYGGFDSPTVAYSVLVVAKVEKGKSKKLKSVKELLGITIMERSSFEKNPIDFLEAKGYKEVKKDLIIKLPKYSLFELENGRKRMLASAGELQKGNELALPSKYVNFLYLASHYEKLKGSPEDNEQKQLFVEQHKHYLDEIIEQISEFSKRVILADANLDKVLSAYNKHRDKPIREQAENIIHLFTLTNLGAPAAFKYFDTTIDRKRYTSTKEVLDATLIHQSITGLYETRIDLSQLGGD

SEQ ID NO: 267 - protein, 1554 aa, synthetic construct
  REGION 1..1554: note = 105 Cas9 TadAins 1068 polypeptide sequence
MDKKYSIGLAIGTNSVGWAVITDEYKVPSKKFKVLGNTDRHSIKKNLIGALLFDSGETAEATRLKRTARRRYTRRKNRICYLQEIFSNEMAKVDDSFFHRLEESFLVEEDKKHERHPIFGNIVDEVAYHEKYPTIYHLRKKLVDSTDKADLRLIYLALAHMIKFRGHFLIEGDLNPDNSDVDKLFIQLVQTYNQLFEENPINASGVDAKAILSARLSKSRRLENLIAQLPGEKKNGLFGNLIALSLGLTPNFKSNFDLAEDAKLQLSKDTYDDDLDNLLAQIGDQYADLFLAAKNLSDAILLSDILRVNTEITKAPLSASMIKRYDEHHQDLTLLKALVRQQLPEKYKEIFFDQSKNGYAGYIDGGASQEEFYKFIKPILEKMDGTEELLVKLNREDLLRKQRTFDNGSIPHQIHLGELHAILRRQEDFYPFLKDNREKIEKILTFRIPYYVGPLARGNSRFAWMTRKSEETITPWNFEEVVDKGASAQSFIERMTNFDKNLPNEKVLPKHSLLYEYFTVYNELTKVKYVTEGMRKPAFLSGEQKKAIVDLLFKTNRKVTVKQLKEDYFKKIECFDSVEISGVEDRFNASLGTYHDLLKIIKDKDFLDNEENEDILEDIVLTLTLFEDREMIEERLKTYAHLFDDKVMKQLKRRRYTGWGRLSRKLINGIRDKQSGKTILDFLKSDGFANRNFMQLIHDDSLTFKEDIQKAQVSGQGDSLHEHIANLAGSPAIKKGILQTVKVVDELVKVMGRHKPENIVIEMARENQTTQKGQKNSRERMKRIEEGIKELGSQILKEHPVENTQLQNEKLYLYYLQNGRDMYVDQELDINRLSDYDVDHIVPQSFLKDDSIDNKVLTRSDKNRGKSDNVPSEEVVKKMKNYWRQLLNAKLITQRKFDNLTKAERGGLSELDKAGFIKRQLVETRQITKHVAQILDSRMNTKYDENDKLIREVKVITLKSKLVSDFRKDFQFYKVREINNYHHAHDAYLNAVVGTALIKKYPKLESEFVYGDYKVYDVRKMIAKSEQEIGKATAKYFFYSNIMNFFKTEITLANGEIRKRPLIETNGEGSSGSETPGTSESATPESSGSEVEFSHEYWMRHALTLAKRARDEREVPVGAVLVLNNRVIGEGWNRAIGLHDPTAHAEIMALRQGGLVMQNYRLIDATLYVTFEPCVMCAGAMIHSRIGRVVFGVRNAKTGAAGSLMDVLHYPGMNHRVEITEGILADECAALLCYFFRMPRQVFNAQKKAQSSTDTGEIVWDKGRDFATVRKVLSMPQVNIVKKTEVQTGGFSKESILPKRNSDKLIARKKDWDPKKYGGFDSPTVAYSVLVVAKVEKGKSKKLKSVKELLGITIMERSSFEKNPIDFLEAKGYKEVKKDLIIKLPKYSLFELENGRKRMLASAGELQKGNELALPSKYVNFLYLASHYEKLKGSPEDNEQKQLFVEQHKHYLDEIIEQISEFSKRVILADANLDKVLSAYNKHRDKPIREQAENIIHLFTLTNLGAPAAFKYFDTTIDRKRYTSTKEVLDATLIHQSITGLYETRIDLSQLGGD

SEQ ID NO: 268 - protein, 1554 aa, synthetic construct
  REGION 1..1554: note = 106 Cas9 TadAins 1247 polypeptide sequence
MDKKYSIGLAIGTNSVGWAVITDEYKVPSKKFKVLGNTDRHSIKKNLIGALLFDSGETAEATRLKRTARRRYTRRKNRICYLQEIFSNEMAKVDDSFFHRLEESFLVEEDKKHERHPIFGNIVDEVAYHEKYPTIYHLRKKLVDSTDKADLRLIYLALAHMIKFRGHFLIEGDLNPDNSDVDKLFIQLVQTYNQLFEENPINASGVDAKAILSARLSKSRRLENLIAQLPGEKKNGLFGNLIALSLGLTPNFKSNFDLAEDAKLQLSKDTYDDDLDNLLAQIGDQYADLFLAAKNLSDAILLSDILRVNTEITKAPLSASMIKRYDEHHQDLTLLKALVRQQLPEKYKEIFFDQSKNGYAGYIDGGASQEEFYKFIKPILEKMDGTEELLVKLNREDLLRKQRTFDNGSIPHQIHLGELHAILRRQEDFYPFLKDNREKIEKILTFRIPYYVGPLARGNSRFAWMTRKSEETITPWNFEEVVDKGASAQSFIERMTNFDKNLPNEKVLPKHSLLYEYFTVYNELTKVKYVTEGMRKPAFLSGEQKKAIVDLLFKTNRKVTVKQLKEDYFKKIECFDSVEISGVEDRFNASLGTYHDLLKIIKDKDFLDNEENEDILEDIVLTLTLFEDREMIEERLKTYAHLFDDKVMKQLKRRRYTGWGRLSRKLINGIRDKQSGKTILDFLKSDGFANRNFMQLIHDDSLTFKEDIQKAQVSGQGDSLHEHIANLAGSPAIKKGILQTVKVVDELVKVMGRHKPENIVIEMARENQTTQKGQKNSRERMKRIEEGIKELGSQILKEHPVENTQLQNEKLYLYYLQNGRDMYVDQELDINRLSDYDVDHIVPQSFLKDDSIDNKVLTRSDKNRGKSDNVPSEEVVKKMKNYWRQLLNAKLITQRKFDNLTKAERGGLSELDKAGFIKRQLVETRQITKHVAQILDSRMNTKYDENDKLIREVKVITLKSKLVSDFRKDFQFYKVREINNYHHAHDAYLNAVVGTALIKKYPKLESEFVYGDYKVYDVRKMIAKSEQEIGKATAKYFFYSNIMNFFKTEITLANGEIRKRPLIETNGETGEIVWDKGRDFATVRKVLSMPQVNIVKKTEVQTGGFSKESILPKRNSDKLIARKKDWDPKKYGGFDSPTVAYSVLVVAKVEKGKSKKLKSVKELLGITIMERSSFEKNPIDFLEAKGYKEVKKDLIIKLPKYSLFELENGRKRMLASAGELQKGNELALPSKYVNFLYLASHYEKLKGGSSGSETPGTSESATPESSGSEVEFSHEYWMRHALTLAKRARDEREVPVGAVLVLNNRVIGEGWNRAIGLHDPTAHAEIMALRQGGLVMQNYRLIDATLYVTFEPCVMCAGAMIHSRIGRVVFGVRNAKTGAAGSLMDVLHYPGMNHRVEITEGILADECAALLCYFFRMPRQVFNAQKKAQSSTDSPEDNEQKQLFVEQHKHYLDEIIEQISEFSKRVILADANLDKVLSAYNKHRDKPIREQAENIIHLFTLTNLGAPAAFKYFDTTIDRKRYTSTKEVLDATLIHQSITGLYETRIDLSQLGGD

SEQ ID NO: 269 - protein, 1554 aa, synthetic construct
  REGION 1..1554: note = 107 Cas9 TadAins 1054 polypeptide sequence
MDKKYSIGLAIGTNSVGWAVITDEYKVPSKKFKVLGNTDRHSIKKNLIGALLFDSGETAEATRLKRTARRRYTRRKNRICYLQEIFSNEMAKVDDSFFHRLEESFLVEEDKKHERHPIFGNIVDEVAYHEKYPTIYHLRKKLVDSTDKADLRLIYLALAHMIKFRGHFLIEGDLNPDNSDVDKLFIQLVQTYNQLFEENPINASGVDAKAILSARLSKSRRLENLIAQLPGEKKNGLFGNLIALSLGLTPNFKSNFDLAEDAKLQLSKDTYDDDLDNLLAQIGDQYADLFLAAKNLSDAILLSDILRVNTEITKAPLSASMIKRYDEHHQDLTLLKALVRQQLPEKYKEIFFDQSKNGYAGYIDGGASQEEFYKFIKPILEKMDGTEELLVKLNREDLLRKQRTFDNGSIPHQIHLGELHAILRRQEDFYPFLKDNREKIEKILTFRIPYYVGPLARGNSRFAWMTRKSEETITPWNFEEVVDKGASAQSFIERMTNFDKNLPNEKVLPKHSLLYEYFTVYNELTKVKYVTEGMRKPAFLSGEQKKAIVDLLFKTNRKVTVKQLKEDYFKKIECFDSVEISGVEDRFNASLGTYHDLLKIIKDKDFLDNEENEDILEDIVLTLTLFEDREMIEERLKTYAHLFDDKVMKQLKRRRYTGWGRLSRKLINGIRDKQSGKTILDFLKSDGFANRNFMQLIHDDSLTFKEDIQKAQVSGQGDSLHEHIANLAGSPAIKKGILQTVKVVDELVKVMGRHKPENIVIEMARENQTTQKGQKNSRERMKRIEEGIKELGSQILKEHPVENTQLQNEKLYLYYLQNGRDMYVDQELDINRLSDYDVDHIVPQSFLKDDSIDNKVLTRSDKNRGKSDNVPSEEVVKKMKNYWRQLLNAKLITQRKFDNLTKAERGGLSELDKAGFIKRQLVETRQITKHVAQILDSRMNTKYDENDKLIREVKVITLKSKLVSDFRKDFQFYKVREINNYHHAHDAYLNAVVGTALIKKYPKLESEFVYGDYKVYDVRKMIAKSEQEIGKATAKYFFYSNIMNFFKTEITLANGSSGSETPGTSESATPESSGSEVEFSHEYWMRHALTLAKRARDEREVPVGAVLVLNNRVIGEGWNRAIGLHDPTAHAEIMALRQGGLVMQNYRLIDATLYVTFEPCVMCAGAMIHSRIGRVVFGVRNAKTGAAGSLMDVLHYPGMNHRVEITEGILADECAALLCYFFRMPRQVFNAQKKAQSSTDGEIRKRPLIETNGETGEIVWDKGRDFATVRKVLSMPQVNIVKKTEVQTGGFSKESILPKRNSDKLIARKKDWDPKKYGGFDSPTVAYSVLVVAKVEKGKSKKLKSVKELLGITIMERSSFEKNPIDFLEAKGYKEVKKDLIIKLPKYSLFELENGRKRMLASAGELQKGNELALPSKYVNFLYLASHYEKLKGSPEDNEQKQLFVEQHKHYLDEIIEQISEFSKRVILADANLDKVLSAYNKHRDKPIREQAENIIHLFTLTNLGAPAAFKYFDTTIDRKRYTSTKEVLDATLIHQSITGLYETRIDLSQLGGD

SEQ ID NO: 270 - protein, 1554 aa, synthetic construct
  REGION 1..1554: note = 108 Cas9 TadAins 1026 polypeptide sequence
MDKKYSIGLAIGTNSVGWAVITDEYKVPSKKFKVLGNTDRHSIKKNLIGALLFDSGETAEATRLKRTARRRYTRRKNRICYLQEIFSNEMAKVDDSFFHRLEESFLVEEDKKHERHPIFGNIVDEVAYHEKYPTIYHLRKKLVDSTDKADLRLIYLALAHMIKFRGHFLIEGDLNPDNSDVDKLFIQLVQTYNQLFEENPINASGVDAKAILSARLSKSRRLENLIAQLPGEKKNGLFGNLIALSLGLTPNFKSNFDLAEDAKLQLSKDTYDDDLDNLLAQIGDQYADLFLAAKNLSDAILLSDILRVNTEITKAPLSASMIKRYDEHHQDLTLLKALVRQQLPEKYKEIFFDQSKNGYAGYIDGGASQEEFYKFIKPILEKMDGTEELLVKLNREDLLRKQRTFDNGSIPHQIHLGELHAILRRQEDFYPFLKDNREKIEKILTFRIPYYVGPLARGNSRFAWMTRKSEETITPWNFEEVVDKGASAQSFIERMTNFDKNLPNEKVLPKHSLLYEYFTVYNELTKVKYVTEGMRKPAFLSGEQKKAIVDLLFKTNRKVTVKQLKEDYFKKIECFDSVEISGVEDRFNASLGTYHDLLKIIKDKDFLDNEENEDILEDIVLTLTLFEDREMIEERLKTYAHLFDDKVMKQLKRRRYTGWGRLSRKLINGIRDKQSGKTILDFLKSDGFANRNFMQLIHDDSLTFKEDIQKAQVSGQGDSLHEHIANLAGSPAIKKGILQTVKVVDELVKVMGRHKPENIVIEMARENQTTQKGQKNSRERMKRIEEGIKELGSQILKEHPVENTQLQNEKLYLYYLQNGRDMYVDQELDINRLSDYDVDHIVPQSFLKDDSIDNKVLTRSDKNRGKSDNVPSEEVVKKMKNYWRQLLNAKLITQRKFDNLTKAERGGLSELDKAGFIKRQLVETRQITKHVAQILDSRMNTKYDENDKLIREVKVITLKSKLVSDFRKDFQFYKVREINNYHHAHDAYLNAVVGTALIKKYPKLESEFVYGDYKVYDVRKMIAKSEGSSGSETPGTSESATPESSGSEVEFSHEYWMRHALTLAKRARDEREVPVGAVLVLNNRVIGEGWNRAIGLHDPTAHAEIMALRQGGLVMQNYRLIDATLYVTFEPCVMCAGAMIHSRIGRVVFGVRNAKTGAAGSLMDVLHYPGMNHRVEITEGILADECAALLCYFFRMPRQVFNAQKKAQSSTDQEIGKATAKYFFYSNIMNFFKTEITLANGEIRKRPLIETNGETGEIVWDKGRDFATVRKVLSMPQVNIVKKTEVQTGGFSKESILPKRNSDKLIARKKDWDPKKYGGFDSPTVAYSVLVVAKVEKGKSKKLKSVKELLGITIMERSSFEKNPIDFLEAKGYKEVKKDLIIKLPKYSLFELENGRKRMLASAGELQKGNELALPSKYVNFLYLASHYEKLKGSPEDNEQKQLFVEQHKHYLDEIIEQISEFSKRVILADANLDKVLSAYNKHRDKPIREQAENIIHLFTLTNLGAPAAFKYFDTTIDRKRYTSTKEVLDATLIHQSITGLYETRIDLSQLGGD

SEQ ID NO: 271 - protein, 1540 aa, synthetic construct
  REGION 1..1540: note = 109 Cas9 TadAins 768 polypeptide sequence
MDKKYSIGLAIGTNSVGWAVITDEYKVPSKKFKVLGNTDRHSIKKNLIGALLFDSGETAEATRLKRTARRRYTRRKNRICYLQEIFSNEMAKVDDSFFHRLEESFLVEEDKKHERHPIFGNIVDEVAYHEKYPTIYHLRKKLVDSTDKADLRLIYLALAHMIKFRGHFLIEGDLNPDNSDVDKLFIQLVQTYNQLFEENPINASGVDAKAILSARLSKSRRLENLIAQLPGEKKNGLFGNLIALSLGLTPNFKSNFDLAEDAKLQLSKDTYDDDLDNLLAQIGDQYADLFLAAKNLSDAILLSDILRVNTEITKAPLSASMIKRYDEHHQDLTLLKALVRQQLPEKYKEIFFDQSKNGYAGYIDGGASQEEFYKFIKPILEKMDGTEELLVKLNREDLLRKQRTFDNGSIPHQIHLGELHAILRRQEDFYPFLKDNREKIEKILTFRIPYYVGPLARGNSRFAWMTRKSEETITPWNFEEVVDKGASAQSFIERMTNFDKNLPNEKVLPKHSLLYEYFTVYNELTKVKYVTEGMRKPAFLSGEQKKAIVDLLFKTNRKVTVKQLKEDYFKKIECFDSVEISGVEDRFNASLGTYHDLLKIIKDKDFLDNEENEDILEDIVLTLTLFEDREMIEERLKTYAHLFDDKVMKQLKRRRYTGWGRLSRKLINGIRDKQSGKTILDFLKSDGFANRNFMQLIHDDSLTFKEDIQKAQVSGQGDSLHEHIANLAGSPAIKKGILQTVKVVDELVKVMGRHKPENIVIEMARENQGSSGSETPGTSESATPESSGSEVEFSHEYWMRHALTLAKRARDEREVPVGAVLVLNNRVIGEGWNRAIGLHDPTAHAEIMALRQGGLVMQNYRLIDATLYVTFEPCVMCAGAMIHSRIGRVVFGVRNAKTGAAGSLMDVLHYPGMNHRVEITEGILADECAALLCYFFRMPRTTQKGQKNSRERMKRIEEGIKELGSQILKEHPVENTQLQNEKLYLYYLQNGRDMYVDQELDINRLSDYDVDHIVPQSFLKDDSIDNKVLTRSDKNRGKSDNVPSEEVVKKMKNYWRQLLNAKLITQRKFDNLTKAERGGLSELDKAGFIKRQLVETRQITKHVAQILDSRMNTKYDENDKLIREVKVITLKSKLVSDFRKDFQFYKVREINNYHHAHDAYLNAVVGTALIKKYPKLESEFVYGDYKVYDVRKMIAKSEQEIGKATAKYFFYSNIMNFFKTEITLANGEIRKRPLIETNGETGEIVWDKGRDFATVRKVLSMPQVNIVKKTEVQTGGFSKESILPKRNSDKLIARKKDWDPKKYGGFDSPTVAYSVLVVAKVEKGKSKKLKSVKELLGITIMERSSFEKNPIDFLEAKGYKEVKKDLIIKLPKYSLFELENGRKRMLASAGELQKGNELALPSKYVNFLYLASHYEKLKGSPEDNEQKQLFVEQHKHYLDEIIEQISEFSKRVILADANLDKVLSAYNKHRDKPIREQAENIIHLFTLTNLGAPAAFKYFDTTIDRKRYTSTKEVLDATLIHQSITGLYETRIDLSQLGGD

SEQ ID NO: 272 - protein, 1540 aa, synthetic construct
  REGION 1..1540: note = 110.1 Cas9 TadAins 1250 polypeptide sequence
MDKKYSIGLAIGTNSVGWAVITDEYKVPSKKFKVLGNTDRHSIKKNLIGALLFDSGETAEATRLKRTARRRYTRRKNRICYLQEIFSNEMAKVDDSFFHRLEESFLVEEDKKHERHPIFGNIVDEVAYHEKYPTIYHLRKKLVDSTDKADLRLIYLALAHMIKFRGHFLIEGDLNPDNSDVDKLFIQLVQTYNQLFEENPINASGVDAKAILSARLSKSRRLENLIAQLPGEKKNGLFGNLIALSLGLTPNFKSNFDLAEDAKLQLSKDTYDDDLDNLLAQIGDQYADLFLAAKNLSDAILLSDILRVNTEITKAPLSASMIKRYDEHHQDLTLLKALVRQQLPEKYKEIFFDQSKNGYAGYIDGGASQEEFYKFIKPILEKMDGTEELLVKLNREDLLRKQRTFDNGSIPHQIHLGELHAILRRQEDFYPFLKDNREKIEKILTFRIPYYVGPLARGNSRFAWMTRKSEETITPWNFEEVVDKGASAQSFIERMTNFDKNLPNEKVLPKHSLLYEYFTVYNELTKVKYVTEGMRKPAFLSGEQKKAIVDLLFKTNRKVTVKQLKEDYFKKIECFDSVEISGVEDRFNASLGTYHDLLKIIKDKDFLDNEENEDILEDIVLTLTLFEDREMIEERLKTYAHLFDDKVMKQLKRRRYTGWGRLSRKLINGIRDKQSGKTILDFLKSDGFANRNFMQLIHDDSLTFKEDIQKAQVSGQGDSLHEHIANLAGSPAIKKGILQTVKVVDELVKVMGRHKPENIVIEMARENQTTQKGQKNSRERMKRIEEGIKELGSQILKEHPVENTQLQNEKLYLYYLQNGRDMYVDQELDINRLSDYDVDHIVPQSFLKDDSIDNKVLTRSDKNRGKSDNVPSEEVVKKMKNYWRQLLNAKLITQRKFDNLTKAERGGLSELDKAGFIKRQLVETRQITKHVAQILDSRMNTKYDENDKLIREVKVITLKSKLVSDFRKDFQFYKVREINNYHHAHDAYLNAVVGTALIKKYPKLESEFVYGDYKVYDVRKMIAKSEQEIGKATAKYFFYSNIMNFFKTEITLANGEIRKRPLIETNGETGEIVWDKGRDFATVRKVLSMPQVNIVKKTEVQTGGFSKESILPKRNSDKLIARKKDWDPKKYGGFDSPTVAYSVLVVAKVEKGKSKKLKSVKELLGITIMERSSFEKNPIDFLEAKGYKEVKKDLIIKLPKYSLFELENGRKRMLASAGELQKGNELALPSKYVNFLYLASHYEKLKGSPGSSGSETPGTSESATPESSGSEVEFSHEYWMRHALTLAKRARDEREVPVGAVLVLNNRVIGEGWNRAIGLHDPTAHAEIMALRQGGLVMQNYRLIDATLYVTFEPCVMCAGAMIHSRIGRVVFGVRNAKTGAAGSLMDVLHYPGMNHRVEITEGILADECAALLCYFFRMPREDNEQKQLFVEQHKHYLDEIIEQISEFSKRVILADANLDKVLSAYNKHRDKPIREQAENIIHLFTLTNLGAPAAFKYFDTTIDRKRYTSTKEVLDATLIHQSITGLYETRIDLSQLGGD

SEQ ID NO: 273 - protein, 1543 aa, synthetic construct
  REGION 1..1543: note = 110.2 Cas9 TadAins 1250 polypeptide sequence
MDKKYSIGLAIGTNSVGWAVITDEYKVPSKKFKVLGNTDRHSIKKNLIGALLFDSGETAEATRLKRTARRRYTRRKNRICYLQEIFSNEMAKVDDSFFHRLEESFLVEEDKKHERHPIFGNIVDEVAYHEKYPTIYHLRKKLVDSTDKADLRLIYLALAHMIKFRGHFLIEGDLNPDNSDVDKLFIQLVQTYNQLFEENPINASGVDAKAILSARLSKSRRLENLIAQLPGEKKNGLFGNLIALSLGLTPNFKSNFDLAEDAKLQLSKDTYDDDLDNLLAQIGDQYADLFLAAKNLSDAILLSDILRVNTEITKAPLSASMIKRYDEHHQDLTLLKALVRQQLPEKYKEIFFDQSKNGYAGYIDGGASQEEFYKFIKPILEKMDGTEELLVKLNREDLLRKQRTFDNGSIPHQIHLGELHAILRRQEDFYPFLKDNREKIEKILTFRIPYYVGPLARGNSRFAWMTRKSEETITPWNFEEVVDKGASAQSFIERMTNFDKNLPNEKVLPKHSLLYEYFTVYNELTKVKYVTEGMRKPAFLSGEQKKAIVDLLFKTNRKVTVKQLKEDYFKKIECFDSVEISGVEDRFNASLGTYHDLLKIIKDKDFLDNEENEDILEDIVLTLTLFEDREMIEERLKTYAHLFDDKVMKQLKRRRYTGWGRLSRKLINGIRDKQSGKTILDFLKSDGFANRNFMQLIHDDSLTFKEDIQKAQVSGQGDSLHEHIANLAGSPAIKKGILQTVKVVDELVKVMGRHKPENIVIEMARENQTTQKGQKNSRERMKRIEEGIKELGSQILKEHPVENTQLQNEKLYLYYLQNGRDMYVDQELDINRLSDYDVDHIVPQSFLKDDSIDNKVLTRSDKNRGKSDNVPSEEVVKKMKNYWRQLLNAKLITQRKFDNLTKAERGGLSELDKAGFIKRQLVETRQITKHVAQILDSRMNTKYDENDKLIREVKVITLKSKLVSDFRKDFQFYKVREINNYHHAHDAYLNAVVGTALIKKYPKLESEFVYGDYKVYDVRKMIAKSEQEIGKATAKYFFYSNIMNFFKTEITLANGEIRKRPLIETNGETGEIVWDKGRDFATVRKVLSMPQVNIVKKTEVQTGGFSKESILPKRNSDKLIARKKDWDPKKYGGFDSPTVAYSVLVVAKVEKGKSKKLKSVKELLGITIMERSSFEKNPIDFLEAKGYKEVKKDLIIKLPKYSLFELENGRKRMLASAGELQKGNELALPSKYVNFLYLASHYEKLKGSPGSSGSSGSETPGTSESATPESSGSEVEFSHEYWMRHALTLAKRARDEREVPVGAVLVLNNRVIGEGWNRAIGLHDPTAHAEIMALRQGGLVMQNYRLIDATLYVTFEPCVMCAGAMIHSRIGRVVFGVRNAKTGAAGSLMDVLHYPGMNHRVEITEGILADECAALLCYFFRMPREDNEQKQLFVEQHKHYLDEIIEQISEFSKRVILADANLDKVLSAYNKHRDKPIREQAENIIHLFTLTNLGAPAAFKYFDTTIDRKRYTSTKEVLDATLIHQSITGLYETRIDLSQLGGD

SEQ ID NO: 274 - protein, 1546 aa, synthetic construct
  REGION 1..1546: note = 110.3 Cas9 TadAins 1250 polypeptide sequence
MDKKYSIGLAIGTNSVGWAVITDEYKVPSKKFKVLGNTDRHSIKKNLIGALLFDSGETAEATRLKRTARRRYTRRKNRICYLQEIFSNEMAKVDDSFFHRLEESFLVEEDKKHERHPIFGNIVDEVAYHEKYPTIYHLRKKLVDSTDKADLRLIYLALAHMIKFRGHFLIEGDLNPDNSDVDKLFIQLVQTYNQLFEENPINASGVDAKAILSARLSKSRRLENLIAQLPGEKKNGLFGNLIALSLGLTPNFKSNFDLAEDAKLQLSKDTYDDDLDNLLAQIGDQYADLFLAAKNLSDAILLSDILRVNTEITKAPLSASMIKRYDEHHQDLTLLKALVRQQLPEKYKEIFFDQSKNGYAGYIDGGASQEEFYKFIKPILEKMDGTEELLVKLNREDLLRKQRTFDNGSIPHQIHLGELHAILRRQEDFYPFLKDNREKIEKILTFRIPYYVGPLARGNSRFAWMTRKSEETITPWNFEEVVDKGASAQSFIERMTNFDKNLPNEKVLPKHSLLYEYFTVYNELTKVKYVTEGMRKPAFLSGEQKKAIVDLLFKTNRKVTVKQLKEDYFKKIECFDSVEISGVEDRFNASLGTYHDLLKIIKDKDFLDNEENEDILEDIVLTLTLFEDREMIEERLKTYAHLFDDKVMKQLKRRRYTGWGRLSRKLINGIRDKQSGKTILDFLKSDGFANRNFMQLIHDDSLTFKEDIQKAQVSGQGDSLHEHIANLAGSPAIKKGILQTVKVVDELVKVMGRHKPENIVIEMARENQTTQKGQKNSRERMKRIEEGIKELGSQILKEHPVENTQLQNEKLYLYYLQNGRDMYVDQELDINRLSDYDVDHIVPQSFLKDDSIDNKVLTRSDKNRGKSDNVPSEEVVKKMKNYWRQLLNAKLITQRKFDNLTKAERGGLSELDKAGFIKRQLVETRQITKHVAQILDSRMNTKYDENDKLIREVKVITLKSKLVSDFRKDFQFYKVREINNYHHAHDAYLNAVVGTALIKKYPKLESEFVYGDYKVYDVRKMIAKSEQEIGKATAKYFFYSNIMNFFKTEITLANGEIRKRPLIETNGETGEIVWDKGRDFATVRKVLSMPQVNIVKKTEVQTGGFSKESILPKRNSDKLIARKKDWDPKKYGGFDSPTVAYSVLVVAKVEKGKSKKLKSVKELLGITIMERSSFEKNPIDFLEAKGYKEVKKDLIIKLPKYSLFELENGRKRMLASAGELQKGNELALPSKYVNFLYLASHYEKLKGSPGSSGSSGSETPGTSESATPESGSSSGSEVEFSHEYWMRHALTLAKRARDEREVPVGAVLVLNNRVIGEGWNRAIGLHDPTAHAEIMALRQGGLVMQNYRLIDATLYVTFEPCVMCAGAMIHSRIGRVVFGVRNAKTGAAGSLMDVLHYPGMNHRVEITEGILADECAALLCYFFRMPREDNEQKQLFVEQHKHYLDEIIEQISEFSKRVILADANLDKVLSAYNKHRDKPIREQAENIIHLFTLTNLGAPAAFKYFDTTIDRKRYTSTKEVLDATLIHQSITGLYETRIDLSQLGGD

SEQ ID NO: 275 - protein, 1546 aa, synthetic construct
  REGION 1..1546: note = 110.4 Cas9 TadAins 1250 polypeptide sequence
MDKKYSIGLAIGTNSVGWAVITDEYKVPSKKFKVLGNTDRHSIKKNLIGALLFDSGETAEATRLKRTARRRYTRRKNRICYLQEIFSNEMAKVDDSFFHRLEESFLVEEDKKHERHPIFGNIVDEVAYHEKYPTIYHLRKKLVDSTDKADLRLIYLALAHMIKFRGHFLIEGDLNPDNSDVDKLFIQLVQTYNQLFEENPINASGVDAKAILSARLSKSRRLENLIAQLPGEKKNGLFGNLIALSLGLTPNFKSNFDLAEDAKLQLSKDTYDDDLDNLLAQIGDQYADLFLAAKNLSDAILLSDILRVNTEITKAPLSASMIKRYDEHHQDLTLLKALVRQQLPEKYKEIFFDQSKNGYAGYIDGGASQEEFYKFIKPILEKMDGTEELLVKLNREDLLRKQRTFDNGSIPHQIHLGELHAILRRQEDFYPFLKDNREKIEKILTFRIPYYVGPLARGNSRFAWMTRKSEETITPWNFEEVVDKGASAQSFIERMTNFDKNLPNEKVLPKHSLLYEYFTVYNELTKVKYVTEGMRKPAFLSGEQKKAIVDLLFKTNRKVTVKQLKEDYFKKIECFDSVEISGVEDRFNASLGTYHDLLKIIKDKDFLDNEENEDILEDIVLTLTLFEDREMIEERLKTYAHLFDDKVMKQLKRRRYTGWGRLSRKLINGIRDKQSGKTILDFLKSDGFANRNFMQLIHDDSLTFKEDIQKAQVSGQGDSLHEHIANLAGSPAIKKGILQTVKVVDELVKVMGRHKPENIVIEMARENQTTQKGQKNSRERMKRIEEGIKELGSQILKEHPVENTQLQNEKLYLYYLQNGRDMYVDQELDINRLSDYDVDHIVPQSFLKDDSIDNKVLTRSDKNRGKSDNVPSEEVVKKMKNYWRQLLNAKLITQRKFDNLTKAERGGLSELDKAGFIKRQLVETRQITKHVAQILDSRMNTKYDENDKLIREVKVITLKSKLVSDFRKDFQFYKVREINNYHHAHDAYLNAVVGTALIKKYPKLESEFVYGDYKVYDVRKMIAKSEQEIGKATAKYFFYSNIMNFFKTEITLANGEIRKRPLIETNGETGEIVWDKGRDFATVRKVLSMPQVNIVKKTEVQTGGFSKESILPKRNSDKLIARKKDWDPKKYGGFDSPTVAYSVLVVAKVEKGKSKKLKSVKELLGITIMERSSFEKNPIDFLEAKGYKEVKKDLIIKLPKYSLFELENGRKRMLASAGELQKGNELALPSKYVNFLYLASHYEKLKGSPGSSGSSGSETPGTSESATPESGSSSGSEVEFSHEYWMRHALTLAKRARDEREVPVGAVLVLNNRVIGEGWNRAIGLHDPTAHAEIMALRQGGLVMQNYRLIDATLYVTFEPCVMCAGAMIHSRIGRVVFGVRNAKTGAAGSLMDVLHYPGMNHRVEITEGILADECAALLCYFFRMRREDNEQKQLFVEQHKHYLDEIIEQISEFSKRVILADANLDKVLSAYNKHRDKPIREQAENIIHLFTLTNLGAPAAFKYFDTTIDRKRYTSTKEVLDATLIHQSITGLYETRIDLSQLGGD

SEQ ID NO: 276 - protein, 1546 aa, synthetic construct
  REGION 1..1546: note = 110.5 Cas9 TadAins 1249 polypeptide sequence
MDKKYSIGLAIGTNSVGWAVITDEYKVPSKKFKVLGNTDRHSIKKNLIGALLFDSGETAEATRLKRTARRRYTRRKNRICYLQEIFSNEMAKVDDSFFHRLEESFLVEEDKKHERHPIFGNIVDEVAYHEKYPTIYHLRKKLVDSTDKADLRLIYLALAHMIKFRGHFLIEGDLNPDNSDVDKLFIQLVQTYNQLFEENPINASGVDAKAILSARLSKSRRLENLIAQLPGEKKNGLFGNLIALSLGLTPNFKSNFDLAEDAKLQLSKDTYDDDLDNLLAQIGDQYADLFLAAKNLSDAILLSDILRVNTEITKAPLSASMIKRYDEHHQDLTLLKALVRQQLPEKYKEIFFDQSKNGYAGYIDGGASQEEFYKFIKPILEKMDGTEELLVKLNREDLLRKQRTFDNGSIPHQIHLGELHAILRRQEDFYPFLKDNREKIEKILTFRIPYYVGPLARGNSRFAWMTRKSEETITPWNFEEVVDKGASAQSFIERMTNFDKNLPNEKVLPKHSLLYEYFTVYNELTKVKYVTEGMRKPAFLSGEQKKAIVDLLFKTNRKVTVKQLKEDYFKKIECFDSVEISGVEDRFNASLGTYHDLLKIIKDKDFLDNEENEDILEDIVLTLTLFEDREMIEERLKTYAHLFDDKVMKQLKRRRYTGWGRLSRKLINGIRDKQSGKTILDFLKSDGFANRNFMQLIHDDSLTFKEDIQKAQVSGQGDSLHEHIANLAGSPAIKKGILQTVKVVDELVKVMGRHKPENIVIEMARENQTTQKGQKNSRERMKRIEEGIKELGSQILKEHPVENTQLQNEKLYLYYLQNGRDMYVDQELDINRLSDYDVDHIVPQSFLKDDSIDNKVLTRSDKNRGKSDNVPSEEVVKKMKNYWRQLLNAKLITQRKFDNLTKAERGGLSELDKAGFIKRQLVETRQITKHVAQILDSRMNTKYDENDKLIREVKVITLKSKLVSDFRKDFQFYKVREINNYHHAHDAYLNAVVGTALIKKYPKLESEFVYGDYKVYDVRKMIAKSEQEIGKATAKYFFYSNIMNFFKTEITLANGEIRKRPLIETNGETGEIVWDKGRDFATVRKVLSMPQVNIVKKTEVQTGGFSKESILPKRNSDKLIARKKDWDPKKYGGFDSPTVAYSVLVVAKVEKGKSKKLKSVKELLGITIMERSSFEKNPIDFLEAKGYKEVKKDLIIKLPKYSLFELENGRKRMLASAGELQKGNELALPSKYVNFLYLASHYEKLKGSGSSGSSGSETPGTSESATPESGSSSGSEVEFSHEYWMRHALTLAKRARDEREVPVGAVLVLNNRVIGEGWNRAIGLHDPTAHAEIMALRQGGLVMQNYRLIDATLYVTFEPCVMCAGAMIHSRIGRVVFGVRNAKTGAAGSLMDVLHYPGMNHRVEITEGILADECAALLCYFFRMRRPEDNEQKQLFVEQHKHYLDEIIEQISEFSKRVILADANLDKVLSAYNKHRDKPIREQAENIIHLFTLTNLGAPAAFKYFDTTIDRKRYTSTKEVLDATLIHQSITGLYETRIDLSQLGGD

SEQ ID NO: 277 - protein, 1551 aa, synthetic construct
  REGION 1..1551: note = 110.5 Cas9 TadAins delta59-66 1250 polypeptide sequence
MDKKYSIGLAIGTNSVGWAVITDEYKVPSKKFKVLGNTDRHSIKKNLIGALLFDSGETAEATRLKRTARRRYTRRKNRICYLQEIFSNEMAKVDDSFFHRLEESFLVEEDKKHERHPIFGNIVDEVAYHEKYPTIYHLRKKLVDSTDKADLRLIYLALAHMIKFRGHFLIEGDLNPDNSDVDKLFIQLVQTYNQLFEENPINASGVDAKAILSARLSKSRRLENLIAQLPGEKKNGLFGNLIALSLGLTPNFKSNFDLAEDAKLQLSKDTYDDDLDNLLAQIGDQYADLFLAAKNLSDAILLSDILRVNTEITKAPLSASMIKRYDEHHQDLTLLKALVRQQLPEKYKEIFFDQSKNGYAGYIDGGASQEEFYKFIKPILEKMDGTEELLVKLNREDLLRKQRTFDNGSIPHQIHLGELHAILRRQEDFYPFLKDNREKIEKILTFRIPYYVGPLARGNSRFAWMTRKSEETITPWNFEEVVDKGASAQSFIERMTNFDKNLPNEKVLPKHSLLYEYFTVYNELTKVKYVTEGMRKPAFLSGEQKKAIVDLLFKTNRKVTVKQLKEDYFKKIECFDSVEISGVEDRFNASLGTYHDLLKIIKDKDFLDNEENEDILEDIVLTLTLFEDREMIEERLKTYAHLFDDKVMKQLKRRRYTGWGRLSRKLINGIRDKQSGKTILDFLKSDGFANRNFMQLIHDDSLTFKEDIQKAQVSGQGDSLHEHIANLAGSPAIKKGILQTVKVVDELVKVMGRHKPENIVIEMARENQTTQKGQKNSRERMKRIEEGIKELGSQILKEHPVENTQLQNEKLYLYYLQNGRDMYVDQELDINRLSDYDVDHIVPQSFLKDDSIDNKVLTRSDKNRGKSDNVPSEEVVKKMKNYWRQLLNAKLITQRKFDNLTKAERGGLSELDKAGFIKRQLVETRQITKHVAQILDSRMNTKYDENDKLIREVKVITLKSKLVSDFRKDFQFYKVREINNYHHAHDAYLNAVVGTALIKKYPKLESEFVYGDYKVYDVRKMIAKSEQEIGKATAKYFFYSNIMNFFKTEITLANGEIRKRPLIETNGETGEIVWDKGRDFATVRKVLSMPQVNIVKKTEVQTGGFSKESILPKRNSDKLIARKKDWDPKKYGGFDSPTVAYSVLVVAKVEKGKSKKLKSVKELLGITIMERSSFEKNPIDFLEAKGYKEVKKDLIIKLPKYSLFELENGRKRMLASAGELQKGNELALPSKYVNFLYLASHYEKLKGSPGSSGSSGSETPGTSESATPESGSSGSEVEFSHEYWMRHALTLAKRARDEREVPVGAVLVLNNRVIGEGWNRAHAEIMALRQGGLVMQNYRLIDATLYVTFEPCVMCAGAMIHSRIGRVVFGVRNAKTGAAGSLMDVLHYPGMNHRVEITEGILADECAALLCYFFRMPRQVFNAQKKAQSSTDEDNEQKQLFVEQHKHYLDEIIEQISEFSKRVILADANLDKVLSAYNKHRDKPIREQAENIIHLFTLTNLGAPAAFKYFDTTIDRKRYTSTKEVLDATLIHQSITGLYETRIDLSQLGGD

SEQ ID NO: 278 - protein, 1546 aa, synthetic construct
  REGION 1..1546: note = 110.6 Cas9 TadAins 1251 polypeptide sequence
MDKKYSIGLAIGTNSVGWAVITDEYKVPSKKFKVLGNTDRHSIKKNLIGALLFDSGETAEATRLKRTARRRYTRRKNRICYLQEIFSNEMAKVDDSFFHRLEESFLVEEDKKHERHPIFGNIVDEVAYHEKYPTIYHLRKKLVDSTDKADLRLIYLALAHMIKFRGHFLIEGDLNPDNSDVDKLFIQLVQTYNQLFEENPINASGVDAKAILSARLSKSRRLENLIAQLPGEKKNGLFGNLIALSLGLTPNFKSNFDLAEDAKLQLSKDTYDDDLDNLLAQIGDQYADLFLAAKNLSDAILLSDILRVNTEITKAPLSASMIKRYDEHHQDLTLLKALVRQQLPEKYKEIFFDQSKNGYAGYIDGGASQEEFYKFIKPILEKMDGTEELLVKLNREDLLRKQRTFDNGSIPHQIHLGELHAILRRQEDFYPFLKDNREKIEKILTFRIPYYVGPLARGNSRFAWMTRKSEETITPWNFEEVVDKGASAQSFIERMTNFDKNLPNEKVLPKHSLLYEYFTVYNELTKVKYVTEGMRKPAFLSGEQKKAIVDLLFKTNRKVTVKQLKEDYFKKIECFDSVEISGVEDRFNASLGTYHDLLKIIKDKDFLDNEENEDILEDIVLTLTLFEDREMIEERLKTYAHLFDDKVMKQLKRRRYTGWGRLSRKLINGIRDKQSGKTILDFLKSDGFANRNFMQLIHDDSLTFKEDIQKAQVSGQGDSLHEHIANLAGSPAIKKGILQTVKVVDELVKVMGRHKPENIVIEMARENQTTQKGQKNSRERMKRIEEGIKELGSQILKEHPVENTQLQNEKLYLYYLQNGRDMYVDQELDINRLSDYDVDHIVPQSFLKDDSIDNKVLTRSDKNRGKSDNVPSEEVVKKMKNYWRQLLNAKLITQRKFDNLTKAERGGLSELDKAGFIKRQLVETRQITKHVAQILDSRMNTKYDENDKLIREVKVITLKSKLVSDFRKDFQFYKVREINNYHHAHDAYLNAVVGTALIKKYPKLESEFVYGDYKVYDVRKMIAKSEQEIGKATAKYFFYSNIMNFFKTEITLANGEIRKRPLIETNGETGEIVWDKGRDFATVRKVLSMPQVNIVKKTEVQTGGFSKESILPKRNSDKLIARKKDWDPKKYGGFDSPTVAYSVLVVAKVEKGKSKKLKSVKELLGITIMERSSFEKNPIDFLEAKGYKEVKKDLIIKLPKYSLFELENGRKRMLASAGELQKGNELALPSKYVNFLYLASHYEKLKGSPEGSSGSSGSETPGTSESATPESGSSSGSEVEFSHEYWMRHALTLAKRARDEREVPVGAVLVLNNRVIGEGWNRAIGLHDPTAHAEIMALRQGGLVMQNYRLIDATLYVTFEPCVMCAGAMIHSRIGRVVFGVRNAKTGAAGSLMDVLHYPGMNHRVEITEGILADECAALLCYFFRMRRDNEQKQLFVEQHKHYLDEIIEQISEFSKRVILADANLDKVLSAYNKHRDKPIREQAENIIHLFTLTNLGAPAAFKYFDTTIDRKRYTSTKEVLDATLIHQSITGLYETRIDLSQLGGD

SEQ ID NO: 279 - protein, 1546 aa, synthetic construct
  REGION 1..1546: note = 110.7 Cas9 TadAins 1252 polypeptide sequence
MDKKYSIGLAIGTNSVGWAVITDEYKVPSKKFKVLGNTDRHSIKKNLIGALLFDSGETAEATRLKRTARRRYTRRKNRICYLQEIFSNEMAKVDDSFFHRLEESFLVEEDKKHERHPIFGNIVDEVAYHEKYPTIYHLRKKLVDSTDKADLRLIYLALAHMIKFRGHFLIEGDLNPDNSDVDKLFIQLVQTYNQLFEENPINASGVDAKAILSARLSKSRRLENLIAQLPGEKKNGLFGNLIALSLGLTPNFKSNFDLAEDAKLQLSKDTYDDDLDNLLAQIGDQYADLFLAAKNLSDAILLSDILRVNTEITKAPLSASMIKRYDEHHQDLTLLKALVRQQLPEKYKEIFFDQSKNGYAGYIDGGASQEEFYKFIKPILEKMDGTEELLVKLNREDLLRKQRTFDNGSIPHQIHLGELHAILRRQEDFYPFLKDNREKIEKILTFRIPYYVGPLARGNSRFAWMTRKSEETITPWNFEEVVDKGASAQSFIERMTNFDKNLPNEKVLPKHSLLYEYFTVYNELTKVKYVTEGMRKPAFLSGEQKKAIVDLLFKTNRKVTVKQLKEDYFKKIECFDSVEISGVEDRFNASLGTYHDLLKIIKDKDFLDNEENEDILEDIVLTLTLFEDREMIEERLKTYAHLFDDKVMKQLKRRRYTGWGRLSRKLINGIRDKQSGKTILDFLKSDGFANRNFMQLIHDDSLTFKEDIQKAQVSGQGDSLHEHIANLAGSPAIKKGILQTVKVVDELVKVMGRHKPENIVIEMARENQTTQKGQKNSRERMKRIEEGIKELGSQILKEHPVENTQLQNEKLYLYYLQNGRDMYVDQELDINRLSDYDVDHIVPQSFLKDDSIDNKVLTRSDKNRGKSDNVPSEEVVKKMKNYWRQLLNAKLITQRKFDNLTKAERGGLSELDKAGFIKRQLVETRQITKHVAQILDSRMNTKYDENDKLIREVKVITLKSKLVSDFRKDFQFYKVREINNYHHAHDAYLNAVVGTALIKKYPKLESEFVYGDYKVYDVRKMIAKSEQEIGKATAKYFFYSNIMNFFKTEITLANGEIRKRPLIETNGETGEIVWDKGRDFATVRKVLSMPQVNIVKKTEVQTGGFSKESILPKRNSDKLIARKKDWDPKKYGGFDSPTVAYSVLVVAKVEKGKSKKLKSVKELLGITIMERSSFEKNPIDFLEAKGYKEVKKDLIIKLPKYSLFELENGRKRMLASAGELQKGNELALPSKYVNFLYLASHYEKLKGSPEDGSSGSSGSETPGTSESATPESGSSSGSEVEFSHEYWMRHALTLAKRARDEREVPVGAVLVLNNRVIGEGWNRAIGLHDPTAHAEIMALRQGGLVMQNYRLIDATLYVTFEPCVMCAGAMIHSRIGRVVFGVRNAKTGAAGSLMDVLHYPGMNHRVEITEGILADECAALLCYFFRMRRNEQKQLFVEQHKHYLDEIIEQISEFSKRVILADANLDKVLSAYNKHRDKPIREQAENIIHLFTLTNLGAPAAFKYFDTTIDRKRYTSTKEVLDATLIHQSITGLYETRIDLSQLGGD

SEQ ID NO: 280 - protein, 1533 aa, synthetic construct
  REGION 1..1533: note = 110.8 Cas9 TadAins delta59-66 C-truncate 1250 polypeptide sequence
MDKKYSIGLAIGTNSVGWAVITDEYKVPSKKFKVLGNTDRHSIKKNLIGALLFDSGETAEATRLKRTARRRYTRRKNRICYLQEIFSNEMAKVDDSFFHRLEESFLVEEDKKHERHPIFGNIVDEVAYHEKYPTIYHLRKKLVDSTDKADLRLIYLALAHMIKFRGHFLIEGDLNPDNSDVDKLFIQLVQTYNQLFEENPINASGVDAKAILSARLSKSRRLENLIAQLPGEKKNGLFGNLIALSLGLTPNFKSNFDLAEDAKLQLSKDTYDDDLDNLLAQIGDQYADLFLAAKNLSDAILLSDILRVNTEITKAPLSASMIKRYDEHHQDLTLLKALVRQQLPEKYKEIFFDQSKNGYAGYIDGGASQEEFYKFIKPILEKMDGTEELLVKLNREDLLRKQRTFDNGSIPHQIHLGELHAILRRQEDFYPFLKDNREKIEKILTFRIPYYVGPLARGNSRFAWMTRKSEETITPWNFEEVVDKGASAQSFIERMTNFDKNLPNEKVLPKHSLLYEYFTVYNELTKVKYVTEGMRKPAFLSGEQKKAIVDLLFKTNRKVTVKQLKEDYFKKIECFDSVEISGVEDRFNASLGTYHDLLKIIKDKDFLDNEENEDILEDIVLTLTLFEDREMIEERLKTYAHLFDDKVMKQLKRRRYTGWGRLSRKLINGIRDKQSGKTILDFLKSDGFANRNFMQLIHDDSLTFKEDIQKAQVSGQGDSLHEHIANLAGSPAIKKGILQTVKVVDELVKVMGRHKPENIVIEMARENQTTQKGQKNSRERMKRIEEGIKELGSQILKEHPVENTQLQNEKLYLYYLQNGRDMYVDQELDINRLSDYDVDHIVPQSFLKDDSIDNKVLTRSDKNRGKSDNVPSEEVVKKMKNYWRQLLNAKLITQRKFDNLTKAERGGLSELDKAGFIKRQLVETRQITKHVAQILDSRMNTKYDENDKLIREVKVITLKSKLVSDFRKDFQFYKVREINNYHHAHDAYLNAVVGTALIKKYPKLESEFVYGDYKVYDVRKMIAKSEQEIGKATAKYFFYSNIMNFFKTEITLANGEIRKRPLIETNGETGEIVWDKGRDFATVRKVLSMPQVNIVKKTEVQTGGFSKESILPKRNSDKLIARKKDWDPKKYGGFDSPTVAYSVLVVAKVEKGKSKKLKSVKELLGITIMERSSFEKNPIDFLEAKGYKEVKKDLIIKLPKYSLFELENGRKRMLASAGELQKGNELALPSKYVNFLYLASHYEKLKGSPGSSGSETPGTSESATPESSGSEVEFSHEYWMRHALTLAKRARDEREVPVGAVLVLNNRVIGEGWNRAHAEIMALRQGGLVMQNYRLIDATLYVTFEPCVMCAGAMIHSRIGRVVFGVRNAKTGAAGSLMDVLHYPGMNHRVEITEGILADECAALLCYFFRMPRQEDNEQKQLFVEQHKHYLDEIIEQISEFSKRVILADANLDKVLSAYNKHRDKPIREQAENIIHLFTLTNLGAPAAFKYFDTTIDRKRYTSTKEVLDATLIHQSITGLYETRIDLSQLGGD

SEQ ID NO: 281 - protein, 1549 aa, synthetic construct
  REGION 1..1549: note = 111.1 Cas9 TadAins 997 polypeptide sequence
MDKKYSIGLAIGTNSVGWAVITDEYKVPSKKFKVLGNTDRHSIKKNLIGALLFDSGETAEATRLKRTARRRYTRRKNRICYLQEIFSNEMAKVDDSFFHRLEESFLVEEDKKHERHPIFGNIVDEVAYHEKYPTIYHLRKKLVDSTDKADLRLIYLALAHMIKFRGHFLIEGDLNPDNSDVDKLFIQLVQTYNQLFEENPINASGVDAKAILSARLSKSRRLENLIAQLPGEKKNGLFGNLIALSLGLTPNFKSNFDLAEDAKLQLSKDTYDDDLDNLLAQIGDQYADLFLAAKNLSDAILLSDILRVNTEITKAPLSASMIKRYDEHHQDLTLLKALVRQQLPEKYKEIFFDQSKNGYAGYIDGGASQEEFYKFIKPILEKMDGTEELLVKLNREDLLRKQRTFDNGSIPHQIHLGELHAILRRQEDFYPFLKDNREKIEKILTFRIPYYVGPLARGNSRFAWMTRKSEETITPWNFEEVVDKGASAQSFIERMTNFDKNLPNEKVLPKHSLLYEYFTVYNELTKVKYVTEGMRKPAFLSGEQKKAIVDLLFKTNRKVTVKQLKEDYFKKIECFDSVEISGVEDRFNASLGTYHDLLKIIKDKDFLDNEENEDILEDIVLTLTLFEDREMIEERLKTYAHLFDDKVMKQLKRRRYTGWGRLSRKLINGIRDKQSGKTILDFLKSDGFANRNFMQLIHDDSLTFKEDIQKAQVSGQGDSLHEHIANLAGSPAIKKGILQTVKVVDELVKVMGRHKPENIVIEMARENQTTQKGQKNSRERMKRIEEGIKELGSQILKEHPVENTQLQNEKLYLYYLQNGRDMYVDQELDINRLSDYDVDHIVPQSFLKDDSIDNKVLTRSDKNRGKSDNVPSEEVVKKMKNYWRQLLNAKLITQRKFDNLTKAERGGLSELDKAGFIKRQLVETRQITKHVAQILDSRMNTKYDENDKLIREVKVITLKSKLVSDFRKDFQFYKVREINNYHHAHDAYLNAVVGTALSHEYWMRHALTLAKRARDEREVPVGAVLVLNNRVIGEGWNRAIGLHDPTAHAEIMALRQGGLVMQNYRLIDATLYVTFEPCVMCAGAMIHSRIGRVVFGVRNAKTGAAGSLMDVLHYPGMNHRVEITEGILADECAALLCYFFRMPRQVFNAQKKAQSSTDGSSGSETPGTSESATPESSGIKKYPKLESEFVYGDYKVYDVRKMIAKSEQEIGKATAKYFFYSNIMNFFKTEITLANGEIRKRPLIETNGETGEIVWDKGRDFATVRKVLSMPQVNIVKKTEVQTGGFSKESILPKRNSDKLIARKKDWDPKKYGGFDSPTVAYSVLVVAKVEKGKSKKLKSVKELLGITIMERSSFEKNPIDFLEAKGYKEVKKDLIIKLPKYSLFELENGRKRMLASAGELQKGNELALPSKYVNFLYLASHYEKLKGSPEDNEQKQLFVEQHKHYLDEIIEQISEFSKRVILADANLDKVLSAYNKHRDKPIREQAENIIHLFTLTNLGAPAAFKYFDTTIDRKRYTSTKEVLDATLIHQSITGLYETRIDLSQLGGD

SEQ ID NO: 282 - protein, 1555 aa, synthetic construct
  REGION 1..1555: note = 111.2 Cas9 TadAins 997 polypeptide sequence
MDKKYSIGLAIGTNSVGWAVITDEYKVPSKKFKVLGNTDRHSIKKNLIGALLFDSGETAEATRLKRTARRRYTRRKNRICYLQEIFSNEMAKVDDSFFHRLEESFLVEEDKKHERHPIFGNIVDEVAYHEKYPTIYHLRKKLVDSTDKADLRLIYLALAHMIKFRGHFLIEGDLNPDNSDVDKLFIQLVQTYNQLFEENPINASGVDAKAILSARLSKSRRLENLIAQLPGEKKNGLFGNLIALSLGLTPNFKSNFDLAEDAKLQLSKDTYDDDLDNLLAQIGDQYADLFLAAKNLSDAILLSDILRVNTEITKAPLSASMIKRYDEHHQDLTLLKALVRQQLPEKYKEIFFDQSKNGYAGYIDGGASQEEFYKFIKPILEKMDGTEELLVKLNREDLLRKQRTFDNGSIPHQIHLGELHAILRRQEDFYPFLKDNREKIEKILTFRIPYYVGPLARGNSRFAWMTRKSEETITPWNFEEVVDKGASAQSFIERMTNFDKNLPNEKVLPKHSLLYEYFTVYNELTKVKYVTEGMRKPAFLSGEQKKAIVDLLFKTNRKVTVKQLKEDYFKKIECFDSVEISGVEDRFNASLGTYHDLLKIIKDKDFLDNEENEDILEDIVLTLTLFEDREMIEERLKTYAHLFDDKVMKQLKRRRYTGWGRLSRKLINGIRDKQSGKTILDFLKSDGFANRNFMQLIHDDSLTFKEDIQKAQVSGQGDSLHEHIANLAGSPAIKKGILQTVKVVDELVKVMGRHKPENIVIEMARENQTTQKGQKNSRERMKRIEEGIKELGSQILKEHPVENTQLQNEKLYLYYLQNGRDMYVDQELDINRLSDYDVDHIVPQSFLKDDSIDNKVLTRSDKNRGKSDNVPSEEVVKKMKNYWRQLLNAKLITQRKFDNLTKAERGGLSELDKAGFIKRQLVETRQITKHVAQILDSRMNTKYDENDKLIREVKVITLKSKLVSDFRKDFQFYKVREINNYHHAHDAYLNAVVGTALSHEYWMRHALTLAKRARDEREVPVGAVLVLNNRVIGEGWNRAIGLHDPTAHAEIMALRQGGLVMQNYRLIDATLYVTFEPCVMCAGAMIHSRIGRVVFGVRNAKTGAAGSLMDVLHYPGMNHRVEITEGILADECAALLCYFFRMPRQVFNAQKKAQSSTDGSSGSSGSETPGTSESATPESSGGSSIKKYPKLESEFVYGDYKVYDVRKMIAKSEQEIGKATAKYFFYSNIMNFFKTEITLANGEIRKRPLIETNGETGEIVWDKGRDFATVRKVLSMPQVNIVKKTEVQTGGFSKESILPKRNSDKLIARKKDWDPKKYGGFDSPTVAYSVLVVAKVEKGKSKKLKSVKELLGITIMERSSFEKNPIDFLEAKGYKEVKKDLIIKLPKYSLFELENGRKRMLASAGELQKGNELALPSKYVNFLYLASHYEKLKGSPEDNEQKQLFVEQHKHYLDEIIEQISEFSKRVILADANLDKVLSAYNKHRDKPIREQAENIIHLFTLTNLGAPAAFKYFDTTIDRKRYTSTKEVLDATLIHQSITGLYETRIDLSQLGGD

SEQ ID NO: 283 - protein, 1421 aa, synthetic construct
  REGION 1..1421: note = 112 delta HNH TadA polypeptide sequence
MDKKYSIGLAIGTNSVGWAVITDEYKVPSKKFKVLGNTDRHSIKKNLIGALLFDSGETAEATRLKRTARRRYTRRKNRICYLQEIFSNEMAKVDDSFFHRLEESFLVEEDKKHERHPIFGNIVDEVAYHEKYPTIYHLRKKLVDSTDKADLRLIYLALAHMIKFRGHFLIEGDLNPDNSDVDKLFIQLVQTYNQLFEENPINASGVDAKAILSARLSKSRRLENLIAQLPGEKKNGLFGNLIALSLGLTPNFKSNFDLAEDAKLQLSKDTYDDDLDNLLAQIGDQYADLFLAAKNLSDAILLSDILRVNTEITKAPLSASMIKRYDEHHQDLTLLKALVRQQLPEKYKEIFFDQSKNGYAGYIDGGASQEEFYKFIKPILEKMDGTEELLVKLNREDLLRKQRTFDNGSIPHQIHLGELHAILRRQEDFYPFLKDNREKIEKILTFRIPYYVGPLARGNSRFAWMTRKSEETITPWNFEEVVDKGASAQSFIERMTNFDKNLPNEKVLPKHSLLYEYFTVYNELTKVKYVTEGMRKPAFLSGEQKKAIVDLLFKTNRKVTVKQLKEDYFKKIECFDSVEISGVEDRFNASLGTYHDLLKIIKDKDFLDNEENEDILEDIVLTLTLFEDREMIEERLKTYAHLFDDKVMKQLKRRRYTGWGRLSRKLINGIRDKQSGKTILDFLKSDGFANRNFMQLIHDDSLTFKEDIQKAQVSGQGDSLHEHIANLAGSPAIKKGILQTVKVVDELVKVMGRHKPENIVIEMARENQTTQKGQKNSRERMKRIEEGIKELGSEVEFSHEYWMRHALTLAKRARDEREVPVGAVLVLNNRVIGEGWNRAIGLHDPTAHAEIMALRQGGLVMQNYRLIDATLYVTFEPCVMCAGAMIHSRIGRVVFGVRNAKTGAAGSLMDVLHYPGMNHRVEITEGILADECAALLCYFFRMPRQVFNAQKKAQSSTDGGLSELDKAGFIKRQLVETRQITKHVAQILDSRMNTKYDENDKLIREVKVITLKSKLVSDFRKDFQFYKVREINNYHHAHDAYLNAVVGTALIKKYPKLESEFVYGDYKVYDVRKMIAKSEQEIGKATAKYFFYSNIMNFFKTEITLANGEIRKRPLIETNGETGEIVWDKGRDFATVRKVLSMPQVNIVKKTEVQTGGFSKESILPKRNSDKLIARKKDWDPKKYGGFDSPTVAYSVLVVAKVEKGKSKKLKSVKELLGITIMERSSFEKNPIDFLEAKGYKEVKKDLIIKLPKYSLFELENGRKRMLASAGELQKGNELALPSKYVNFLYLASHYEKLKGSPEDNEQKQLFVEQHKHYLDEIIEQISEFSKRVILADANLDKVLSAYNKHRDKPIREQAENIIHLFTLTNLGAPAAFKYFDTTIDRKRYTSTKEVLDATLIHQSITGLYETRIDLSQLGGD

SEQ ID NO: 284 - protein, 1552 aa, synthetic construct
  REGION 1..1552: note = 113 N-term single TadA helixtrunc 165-end polypeptide sequence
MSEVEFSHEYWMRHALTLAKRARDEREVPVGAVLVLNNRVIGEGWNRAIGLHDPTAHAEIMALRQGGLVMQNYRLIDATLYVTFEPCVMCAGAMIHSRIGRVVFGVRNAKTGAAGSLMDVLHYPGMNHRVEITEGILADECAALLCYFFRMPRSGGSSGGSSGSETPGTSESATPESSGGSSGGSDKKYSIGLAIGTNSVGWAVITDEYKVPSKKFKVLGNTDRHSIKKNLIGALLFDSGETAEATRLKRTARRRYTRRKNRICYLQEIFSNEMAKVDDSFFHRLEESFLVEEDKKHERHPIFGNIVDEVAYHEKYPTIYHLRKKLVDSTDKADLRLIYLALAHMIKFRGHFLIEGDLNPDNSDVDKLFIQLVQTYNQLFEENPINASGVDAKAILSARLSKSRRLENLIAQLPGEKKNGLFGNLIALSLGLTPNFKSNFDLAEDAKLQLSKDTYDDDLDNLLAQIGDQYADLFLAAKNLSDAILLSDILRVNTEITKAPLSASMIKRYDEHHQDLTLLKALVRQQLPEKYKEIFFDQSKNGYAGYIDGGASQEEFYKFIKPILEKMDGTEELLVKLNREDLLRKQRTFDNGSIPHQIHLGELHAILRRQEDFYPFLKDNREKIEKILTFRIPYYVGPLARGNSRFAWMTRKSEETITPWNFEEVVDKGASAQSFIERMTNFDKNLPNEKVLPKHSLLYEYFTVYNELTKVKYVTEGMRKPAFLSGEQKKAIVDLLFKTNRKVTVKQLKEDYFKKIECFDSVEISGVEDRFNASLGTYHDLLKIIKDKDFLDNEENEDILEDIVLTLTLFEDREMIEERLKTYAHLFDDKVMKQLKRRRYTGWGRLSRKLINGIRDKQSGKTILDFLKSDGFANRNFMQLIHDDSLTFKEDIQKAQVSGQGDSLHEHIANLAGSPAIKKGILQTVKVVDELVKVMGRHKPENIVIEMARENQTTQKGQKNSRERMKRIEEGIKELGSQILKEHPVENTQLQNEKLYLYYLQNGRDMYVDQELDINRLSDYDVDHIVPQSFLKDDSIDNKVLTRSDKNRGKSDNVPSEEVVKKMKNYWRQLLNAKLITQRKFDNLTKAERGGLSELDKAGFIKRQLVETRQITKHVAQILDSRMNTKYDENDKLIREVKVITLKSKLVSDFRKDFQFYKVREINNYHHAHDAYLNAVVGTALIKKYPKLESEFVYGDYKVYDVRKMIAKSEQEIGKATAKYFFYSNIMNFFKTEITLANGEIRKRPLIETNGETGEIVWDKGRDFATVRKVLSMPQVNIVKKTEVQTGGFSKESILPKRNSDKLIARKKDWDPKKYGGFDSPTVAYSVLVVAKVEKGKSKKLKSVKELLGITIMERSSFEKNPIDFLEAKGYKEVKKDLIIKLPKYSLFELENGRKRMLASAGELQKGNELALPSKYVNFLYLASHYEKLKGSPEDNEQKQLFVEQHKHYLDEIIEQISEFSKRVILADANLDKVLSAYNKHRDKPIREQAENIIHLFTLTNLGAPAAFKYFDTTIDRKRYTSTKEVLDATLIHQSITGLYETRIDLSQLGGD

SEQ ID NO: 285 - protein, 1545 aa, synthetic construct
  REGION 1..1545: note = 114 N-term single TadA helixtrunc 165-end delta 59-65 polypeptide sequence
MSEVEFSHEYWMRHALTLAKRARDEREVPVGAVLVLNNRVIGEGWNRTAHAEIMALRQGGLVMQNYRLIDATLYVTFEPCVMCAGAMIHSRIGRVVFGVRNAKTGAAGSLMDVLHYPGMNHRVEITEGILADECAALLCYFFRMPRSGGSSGGSSGSETPGTSESATPESSGGSSGGSDKKYSIGLAIGTNSVGWAVITDEYKVPSKKFKVLGNTDRHSIKKNLIGALLFDSGETAEATRLKRTARRRYTRRKNRICYLQEIFSNEMAKVDDSFFHRLEESFLVEEDKKHERHPIFGNIVDEVAYHEKYPTIYHLRKKLVDSTDKADLRLIYLALAHMIKFRGHFLIEGDLNPDNSDVDKLFIQLVQTYNQLFEENPINASGVDAKAILSARLSKSRRLENLIAQLPGEKKNGLFGNLIALSLGLTPNFKSNFDLAEDAKLQLSKDTYDDDLDNLLAQIGDQYADLFLAAKNLSDAILLSDILRVNTEITKAPLSASMIKRYDEHHQDLTLLKALVRQQLPEKYKEIFFDQSKNGYAGYIDGGASQEEFYKFIKPILEKMDGTEELLVKLNREDLLRKQRTFDNGSIPHQIHLGELHAILRRQEDFYPFLKDNREKIEKILTFRIPYYVGPLARGNSRFAWMTRKSEETITPWNFEEVVDKGASAQSFIERMTNFDKNLPNEKVLPKHSLLYEYFTVYNELTKVKYVTEGMRKPAFLSGEQKKAIVDLLFKTNRKVTVKQLKEDYFKKIECFDSVEISGVEDRFNASLGTYHDLLKIIKDKDFLDNEENEDILEDIVLTLTLFEDREMIEERLKTYAHLFDDKVMKQLKRRRYTGWGRLSRKLINGIRDKQSGKTILDFLKSDGFANRNFMQLIHDDSLTFKEDIQKAQVSGQGDSLHEHIANLAGSPAIKKGILQTVKVVDELVKVMGRHKPENIVIEMARENQTTQKGQKNSRERMKRIEEGIKELGSQILKEHPVENTQLQNEKLYLYYLQNGRDMYVDQELDINRLSDYDVDHIVPQSFLKDDSIDNKVLTRSDKNRGKSDNVPSEEVVKKMKNYWRQLLNAKLITQRKFDNLTKAERGGLSELDKAGFIKRQLVETRQITKHVAQILDSRMNTKYDENDKLIREVKVITLKSKLVSDFRKDFQFYKVREINNYHHAHDAYLNAVVGTALIKKYPKLESEFVYGDYKVYDVRKMIAKSEQEIGKATAKYFFYSNIMNFFKTEITLANGEIRKRPLIETNGETGEIVWDKGRDFATVRKVLSMPQVNIVKKTEVQTGGFSKESILPKRNSDKLIARKKDWDPKKYGGFDSPTVAYSVLVVAKVEKGKSKKLKSVKELLGITIMERSSFEKNPIDFLEAKGYKEVKKDLIIKLPKYSLFELENGRKRMLASAGELQKGNELALPSKYVNFLYLASHYEKLKGSPEDNEQKQLFVEQHKHYLDEIIEQISEFSKRVILADANLDKVLSAYNKHRDKPIREQAENIIHLFTLTNLGAPAAFKYFDTTIDRKRYTSTKEVLDATLIHQSITGLYETRIDLSQLGGD

SEQ ID NO: 286 - protein, 1541 aa, synthetic construct
  REGION 1..1541: note = 115.1 Cas9 TadAins 1004 polypeptide sequence
MDKKYSIGLAIGTNSVGWAVITDEYKVPSKKFKVLGNTDRHSIKKNLIGALLFDSGETAEATRLKRTARRRYTRRKNRICYLQEIFSNEMAKVDDSFFHRLEESFLVEEDKKHERHPIFGNIVDEVAYHEKYPTIYHLRKKLVDSTDKADLRLIYLALAHMIKFRGHFLIEGDLNPDNSDVDKLFIQLVQTYNQLFEENPINASGVDAKAILSARLSKSRRLENLIAQLPGEKKNGLFGNLIALSLGLTPNFKSNFDLAEDAKLQLSKDTYDDDLDNLLAQIGDQYADLFLAAKNLSDAILLSDILRVNTEITKAPLSASMIKRYDEHHQDLTLLKALVRQQLPEKYKEIFFDQSKNGYAGYIDGGASQEEFYKFIKPILEKMDGTEELLVKLNREDLLRKQRTFDNGSIPHQIHLGELHAILRRQEDFYPFLKDNREKIEKILTFRIPYYVGPLARGNSRFAWMTRKSEETITPWNFEEVVDKGASAQSFIERMTNFDKNLPNEKVLPKHSLLYEYFTVYNELTKVKYVTEGMRKPAFLSGEQKKAIVDLLFKTNRKVTVKQLKEDYFKKIECFDSVEISGVEDRFNASLGTYHDLLKIIKDKDFLDNEENEDILEDIVLTLTLFEDREMIEERLKTYAHLFDDKVMKQLKRRRYTGWGRLSRKLINGIRDKQSGKTILDFLKSDGFANRNFMQLIHDDSLTFKEDIQKAQVSGQGDSLHEHIANLAGSPAIKKGILQTVKVVDELVKVMGRHKPENIVIEMARENQTTQKGQKNSRERMKRIEEGIKELGSQILKEHPVENTQLQNEKLYLYYLQNGRDMYVDQELDINRLSDYDVDHIVPQSFLKDDSIDNKVLTRSDKNRGKSDNVPSEEVVKKMKNYWRQLLNAKLITQRKFDNLTKAERGGLSELDKAGFIKRQLVETRQITKHVAQILDSRMNTKYDENDKLIREVKVITLKSKLVSDFRKDFQFYKVREINNYHHAHDAYLNAVVGTALIKKYPKGSSGSETPGTSESATPESSGSEVEFSHEYWMRHALTLAKRARDEREVPVGAVLVLNNRVIGEGWNRAIGLHDPTAHAEIMALRQGGLVMQNYRLIDATLYVTFEPCVMCAGAMIHSRIGRVVFGVRNAKTGAAGSLMDVLHYPGMNHRVEITEGILADECAALLCYFFRMPRQLESEFVYGDYKVYDVRKMIAKSEQEIGKATAKYFFYSNIMNFFKTEITLANGEIRKRPLIETNGETGEIVWDKGRDFATVRKVLSMPQVNIVKKTEVQTGGFSKESILPKRNSDKLIARKKDWDPKKYGGFDSPTVAYSVLVVAKVEKGKSKKLKSVKELLGITIMERSSFEKNPIDFLEAKGYKEVKKDLIIKLPKYSLFELENGRKRMLASAGELQKGNELALPSKYVNFLYLASHYEKLKGSPEDNEQKQLFVEQHKHYLDEIIEQISEFSKRVILADANLDKVLSAYNKHRDKPIREQAENIIHLFTLTNLGAPAAFKYFDTTIDRKRYTSTKEVLDATLIHQSITGLYETRIDLSQLGGD

SEQ ID NO: 287 - protein, 1541 aa, synthetic construct
  REGION 1..1541: note = 115.2 Cas9 TadAins 1005 polypeptide sequence
MDKKYSIGLAIGTNSVGWAVITDEYKVPSKKFKVLGNTDRHSIKKNLIGALLFDSGETAEATRLKRTARRRYTRRKNRICYLQEIFSNEMAKVDDSFFHRLEESFLVEEDKKHERHPIFGNIVDEVAYHEKYPTIYHLRKKLVDSTDKADLRLIYLALAHMIKFRGHFLIEGDLNPDNSDVDKLFIQLVQTYNQLFEENPINASGVDAKAILSARLSKSRRLENLIAQLPGEKKNGLFGNLIALSLGLTPNFKSNFDLAEDAKLQLSKDTYDDDLDNLLAQIGDQYADLFLAAKNLSDAILLSDILRVNTEITKAPLSASMIKRYDEHHQDLTLLKALVRQQLPEKYKEIFFDQSKNGYAGYIDGGASQEEFYKFIKPILEKMDGTEELLVKLNREDLLRKQRTFDNGSIPHQIHLGELHAILRRQEDFYPFLKDNREKIEKILTFRIPYYVGPLARGNSRFAWMTRKSEETITPWNFEEVVDKGASAQSFIERMTNFDKNLPNEKVLPKHSLLYEYFTVYNELTKVKYVTEGMRKPAFLSGEQKKAIVDLLFKTNRKVTVKQLKEDYFKKIECFDSVEISGVEDRFNASLGTYHDLLKIIKDKDFLDNEENEDILEDIVLTLTLFEDREMIEERLKTYAHLFDDKVMKQLKRRRYTGWGRLSRKLINGIRDKQSGKTILDFLKSDGFANRNFMQLIHDDSLTFKEDIQKAQVSGQGDSLHEHIANLAGSPAIKKGILQTVKVVDELVKVMGRHKPENIVIEMARENQTTQKGQKNSRERMKRIEEGIKELGSQILKEHPVENTQLQNEKLYLYYLQNGRDMYVDQELDINRLSDYDVDHIVPQSFLKDDSIDNKVLTRSDKNRGKSDNVPSEEVVKKMKNYWRQLLNAKLITQRKFDNLTKAERGGLSELDKAGFIKRQLVETRQITKHVAQILDSRMNTKYDENDKLIREVKVITLKSKLVSDFRKDFQFYKVREINNYHHAHDAYLNAVVGTALIKKYPKLGSSGSETPGTSESATPESSGSEVEFSHEYWMRHALTLAKRARDEREVPVGAVLVLNNRVIGEGWNRAIGLHDPTAHAEIMALRQGGLVMQNYRLIDATLYVTFEPCVMCAGAMIHSRIGRVVFGVRNAKTGAAGSLMDVLHYPGMNHRVEITEGILADECAALLCYFFRMPRQESEFVYGDYKVYDVRKMIAKSEQEIGKATAKYFFYSNIMNFFKTEITLANGEIRKRPLIETNGETGEIVWDKGRDFATVRKVLSMPQVNIVKKTEVQTGGFSKESILPKRNSDKLIARKKDWDPKKYGGFDSPTVAYSVLVVAKVEKGKSKKLKSVKELLGITIMERSSFEKNPIDFLEAKGYKEVKKDLIIKLPKYSLFELENGRKRMLASAGELQKGNELALPSKYVNFLYLASHYEKLKGSPEDNEQKQLFVEQHKHYLDEIIEQISEFSKRVILADANLDKVLSAYNKHRDKPIREQAENIIHLFTLTNLGAPAAFKYFDTTIDRKRYTSTKEVLDATLIHQSITGLYETRIDLSQLGGD

SEQ ID NO: 288 - protein, 1541 aa, synthetic construct
  REGION 1..1541: note = 115.3 Cas9 TadAins 1006 polypeptide sequence
MDKKYSIGLAIGTNSVGWAVITDEYKVPSKKFKVLGNTDRHSIKKNLIGALLFDSGETAEATRLKRTARRRYTRRKNRICYLQEIFSNEMAKVDDSFFHRLEESFLVEEDKKHERHPIFGNIVDEVAYHEKYPTIYHLRKKLVDSTDKADLRLIYLALAHMIKFRGHFLIEGDLNPDNSDVDKLFIQLVQTYNQLFEENPINASGVDAKAILSARLSKSRRLENLIAQLPGEKKNGLFGNLIALSLGLTPNFKSNFDLAEDAKLQLSKDTYDDDLDNLLAQIGDQYADLFLAAKNLSDAILLSDILRVNTEITKAPLSASMIKRYDEHHQDLTLLKALVRQQLPEKYKEIFFDQSKNGYAGYIDGGASQEEFYKFIKPILEKMDGTEELLVKLNREDLLRKQRTFDNGSIPHQIHLGELHAILRRQEDFYPFLKDNREKIEKILTFRIPYYVGPLARGNSRFAWMTRKSEETITPWNFEEVVDKGASAQSFIERMTNFDKNLPNEKVLPKHSLLYEYFTVYNELTKVKYVTEGMRKPAFLSGEQKKAIVDLLFKTNRKVTVKQLKEDYFKKIECFDSVEISGVEDRFNASLGTYHDLLKIIKDKDFLDNEENEDILEDIVLTLTLFEDREMIEERLKTYAHLFDDKVMKQLKRRRYTGWGRLSRKLINGIRDKQSGKTILDFLKSDGFANRNFMQLIHDDSLTFKEDIQKAQVSGQGDSLHEHIANLAGSPAIKKGILQTVKVVDELVKVMGRHKPENIVIEMARENQTTQKGQKNSRERMKRIEEGIKELGSQILKEHPVENTQLQNEKLYLYYLQNGRDMYVDQELDINRLSDYDVDHIVPQSFLKDDSIDNKVLTRSDKNRGKSDNVPSEEVVKKMKNYWRQLLNAKLITQRKFDNLTKAERGGLSELDKAGFIKRQLVETRQITKHVAQILDSRMNTKYDENDKLIREVKVITLKSKLVSDFRKDFQFYKVREINNYHHAHDAYLNAVVGTALIKKYPKLEGSSGSETPGTSESATPESSGSEVEFSHEYWMRHALTLAKRARDEREVPVGAVLVLNNRVIGEGWNRAIGLHDPTAHAEIMALRQGGLVMQNYRLIDATLYVTFEPCVMCAGAMIHSRIGRVVFGVRNAKTGAAGSLMDVLHYPGMNHRVEITEGILADECAALLCYFFRMPRQSEFVYGDYKVYDVRKMIAKSEQEIGKATAKYFFYSNIMNFFKTEITLANGEIRKRPLIETNGETGEIVWDKGRDFATVRKVLSMPQVNIVKKTEVQTGGFSKESILPKRNSDKLIARKKDWDPKKYGGFDSPTVAYSVLVVAKVEKGKSKKLKSVKELLGITIMERSSFEKNPIDFLEAKGYKEVKKDLIIKLPKYSLFELENGRKRMLASAGELQKGNELALPSKYVNFLYLASHYEKLKGSPEDNEQKQLFVEQHKHYLDEIIEQISEFSKRVILADANLDKVLSAYNKHRDKPIREQAENIIHLFTLTNLGAPAAFKYFDTTIDRKRYTSTKEVLDATLIHQSITGLYETRIDLSQLGGD

SEQ ID NO: 289 - protein, 1541 aa, synthetic construct
  REGION 1..1541: note = 115.4 Cas9 TadAins 1007 polypeptide sequence
MDKKYSIGLAIGTNSVGWAVITDEYKVPSKKFKVLGNTDRHSIKKNLIGALLFDSGETAEATRLKRTARRRYTRRKNRICYLQEIFSNEMAKVDDSFFHRLEESFLVEEDKKHERHPIFGNIVDEVAYHEKYPTIYHLRKKLVDSTDKADLRLIYLALAHMIKFRGHFLIEGDLNPDNSDVDKLFIQLVQTYNQLFEENPINASGVDAKAILSARLSKSRRLENLIAQLPGEKKNGLFGNLIALSLGLTPNFKSNFDLAEDAKLQLSKDTYDDDLDNLLAQIGDQYADLFLAAKNLSDAILLSDILRVNTEITKAPLSASMIKRYDEHHQDLTLLKALVRQQLPEKYKEIFFDQSKNGYAGYIDGGASQEEFYKFIKPILEKMDGTEELLVKLNREDLLRKQRTFDNGSIPHQIHLGELHAILRRQEDFYPFLKDNREKIEKILTFRIPYYVGPLARGNSRFAWMTRKSEETITPWNFEEVVDKGASAQSFIERMTNFDKNLPNEKVLPKHSLLYEYFTVYNELTKVKYVTEGMRKPAFLSGEQKKAIVDLLFKTNRKVTVKQLKEDYFKKIECFDSVEISGVEDRFNASLGTYHDLLKIIKDKDFLDNEENEDILEDIVLTLTLFEDREMIEERLKTYAHLFDDKVMKQLKRRRYTGWGRLSRKLINGIRDKQSGKTILDFLKSDGFANRNFMQLIHDDSLTFKEDIQKAQVSGQGDSLHEHIANLAGSPAIKKGILQTVKVVDELVKVMGRHKPENIVIEMARENQTTQKGQKNSRERMKRIEEGIKELGSQILKEHPVENTQLQNEKLYLYYLQNGRDMYVDQELDINRLSDYDVDHIVPQSFLKDDSIDNKVLTRSDKNRGKSDNVPSEEVVKKMKNYWRQLLNAKLITQRKFDNLTKAERGGLSELDKAGFIKRQLVETRQITKHVAQILDSRMNTKYDENDKLIREVKVITLKSKLVSDFRKDFQFYKVREINNYHHAHDAYLNAVVGTALIKKYPKLESGSSGSETPGTSESATPESSGSEVEFSHEYWMRHALTLAKRARDEREVPVGAVLVLNNRVIGEGWNRAIGLHDPTAHAEIMALRQGGLVMQNYRLIDATLYVTFEPCVMCAGAMIHSRIGRVVFGVRNAKTGAAGSLMDVLHYPGMNHRVEITEGILADECAALLCYFFRMPRQEFVYGDYKVYDVRKMIAKSEQEIGKATAKYFFYSNIMNFFKTEITLANGEIRKRPLIETNGETGEIVWDKGRDFATVRKVLSMPQVNIVKKTEVQTGGFSKESILPKRNSDKLIARKKDWDPKKYGGFDSPTVAYSVLVVAKVEKGKSKKLKSVKELLGITIMERSSFEKNPIDFLEAKGYKEVKKDLIIKLPKYSLFELENGRKRMLASAGELQKGNELALPSKYVNFLYLASHYEKLKGSPEDNEQKQLFVEQHKHYLDEIIEQISEFSKRVILADANLDKVLSAYNKHRDKPIREQAENIIHLFTLTNLGAPAAFKYFDTTIDRKRYTSTKEVLDATLIHQSITGLYETRIDLSQLGGD

SEQ ID NO: 290 - protein, 1541 aa, synthetic construct
  REGION 1..1541: note = 116.1 Cas9 TadAins C-term truncate 792 polypeptide sequence
MDKKYSIGLAIGTNSVGWAVITDEYKVPSKKFKVLGNTDRHSIKKNLIGALLFDSGETAEATRLKRTARRRYTRRKNRICYLQEIFSNEMAKVDDSFFHRLEESFLVEEDKKHERHPIFGNIVDEVAYHEKYPTIYHLRKKLVDSTDKADLRLIYLALAHMIKFRGHFLIEGDLNPDNSDVDKLFIQLVQTYNQLFEENPINASGVDAKAILSARLSKSRRLENLIAQLPGEKKNGLFGNLIALSLGLTPNFKSNFDLAEDAKLQLSKDTYDDDLDNLLAQIGDQYADLFLAAKNLSDAILLSDILRVNTEITKAPLSASMIKRYDEHHQDLTLLKALVRQQLPEKYKEIFFDQSKNGYAGYIDGGASQEEFYKFIKPILEKMDGTEELLVKLNREDLLRKQRTFDNGSIPHQIHLGELHAILRRQEDFYPFLKDNREKIEKILTFRIPYYVGPLARGNSRFAWMTRKSEETITPWNFEEVVDKGASAQSFIERMTNFDKNLPNEKVLPKHSLLYEYFTVYNELTKVKYVTEGMRKPAFLSGEQKKAIVDLLFKTNRKVTVKQLKEDYFKKIECFDSVEISGVEDRFNASLGTYHDLLKIIKDKDFLDNEENEDILEDIVLTLTLFEDREMIEERLKTYAHLFDDKVMKQLKRRRYTGWGRLSRKLINGIRDKQSGKTILDFLKSDGFANRNFMQLIHDDSLTFKEDIQKAQVSGQGDSLHEHIANLAGSPAIKKGILQTVKVVDELVKVMGRHKPENIVIEMARENQTTQKGQKNSRERMKRIEEGIKELGGSSGSETPGTSESATPESSGSEVEFSHEYWMRHALTLAKRARDEREVPVGAVLVLNNRVIGEGWNRAIGLHDPTAHAEIMALRQGGLVMQNYRLIDATLYVTFEPCVMCAGAMIHSRIGRVVFGVRNAKTGAAGSLMDVLHYPGMNHRVEITEGILADECAALLCYFFRMPRQSQILKEHPVENTQLQNEKLYLYYLQNGRDMYVDQELDINRLSDYDVDHIVPQSFLKDDSIDNKVLTRSDKNRGKSDNVPSEEVVKKMKNYWRQLLNAKLITQRKFDNLTKAERGGLSELDKAGFIKRQLVETRQITKHVAQILDSRMNTKYDENDKLIREVKVITLKSKLVSDFRKDFQFYKVREINNYHHAHDAYLNAVVGTALIKKYPKLESEFVYGDYKVYDVRKMIAKSEQEIGKATAKYFFYSNIMNFFKTEITLANGEIRKRPLIETNGETGEIVWDKGRDFATVRKVLSMPQVNIVKKTEVQTGGFSKESILPKRNSDKLIARKKDWDPKKYGGFDSPTVAYSVLVVAKVEKGKSKKLKSVKELLGITIMERSSFEKNPIDFLEAKGYKEVKKDLIIKLPKYSLFELENGRKRMLASAGELQKGNELALPSKYVNFLYLASHYEKLKGSPEDNEQKQLFVEQHKHYLDEIIEQISEFSKRVILADANLDKVLSAYNKHRDKPIREQAENIIHLFTLTNLGAPAAFKYFDTTIDRKRYTSTKEVLDATLIHQSITGLYETRIDLSQLGGD

SEQ ID NO: 291 - protein, 1541 aa, synthetic construct
  REGION 1..1541: note = 116.2 Cas9 TadAins C-term truncate 791 polypeptide sequence
MDKKYSIGLAIGTNSVGWAVITDEYKVPSKKFKVLGNTDRHSIKKNLIGALLFDSGETAEATRLKRTARRRYTRRKNRICYLQEIFSNEMAKVDDSFFHRLEESFLVEEDKKHERHPIFGNIVDEVAYHEKYPTIYHLRKKLVDSTDKADLRLIYLALAHMIKFRGHFLIEGDLNPDNSDVDKLFIQLVQTYNQLFEENPINASGVDAKAILSARLSKSRRLENLIAQLPGEKKNGLFGNLIALSLGLTPNFKSNFDLAEDAKLQLSKDTYDDDLDNLLAQIGDQYADLFLAAKNLSDAILLSDILRVNTEITKAPLSASMIKRYDEHHQDLTLLKALVRQQLPEKYKEIFFDQSKNGYAGYIDGGASQEEFYKFIKPILEKMDGTEELLVKLNREDLLRKQRTFDNGSIPHQIHLGELHAILRRQEDFYPFLKDNREKIEKILTFRIPYYVGPLARGNSRFAWMTRKSEETITPWNFEEVVDKGASAQSFIERMTNFDKNLPNEKVLPKHSLLYEYFTVYNELTKVKYVTEGMRKPAFLSGEQKKAIVDLLFKTNRKVTVKQLKEDYFKKIECFDSVEISGVEDRFNASLGTYHDLLKIIKDKDFLDNEENEDILEDIVLTLTLFEDREMIEERLKTYAHLFDDKVMKQLKRRRYTGWGRLSRKLINGIRDKQSGKTILDFLKSDGFANRNFMQLIHDDSLTFKEDIQKAQVSGQGDSLHEHIANLAGSPAIKKGILQTVKVVDELVKVMGRHKPENIVIEMARENQTTQKGQKNSRERMKRIEEGIKELGSSGSETPGTSESATPESSGSEVEFSHEYWMRHALTLAKRARDEREVPVGAVLVLNNRVIGEGWNRAIGLHDPTAHAEIMALRQGGLVMQNYRLIDATLYVTFEPCVMCAGAMIHSRIGRVVFGVRNAKTGAAGSLMDVLHYPGMNHRVEITEGILADECAALLCYFFRMPRQGSQILKEHPVENTQLQNEKLYLYYLQNGRDMYVDQELDINRLSDYDVDHIVPQSFLKDDSIDNKVLTRSDKNRGKSDNVPSEEVVKKMKNYWRQLLNAKLITQRKFDNLTKAERGGLSELDKAGFIKRQLVETRQITKHVAQILDSRMNTKYDENDKLIREVKVITLKSKLVSDFRKDFQFYKVREINNYHHAHDAYLNAVVGTALIKKYPKLESEFVYGDYKVYDVRKMIAKSEQEIGKATAKYFFYSNIMNFFKTEITLANGEIRKRPLIETNGETGEIVWDKGRDFATVRKVLSMPQVNIVKKTEVQTGGFSKESILPKRNSDKLIARKKDWDPKKYGGFDSPTVAYSVLVVAKVEKGKSKKLKSVKELLGITIMERSSFEKNPIDFLEAKGYKEVKKDLIIKLPKYSLFELENGRKRMLASAGELQKGNELALPSKYVNFLYLASHYEKLKGSPEDNEQKQLFVEQHKHYLDEIIEQISEFSKRVILADANLDKVLSAYNKHRDKPIREQAENIIHLFTLTNLGAPAAFKYFDTTIDRKRYTSTKEVLDATLIHQSITGLYETRIDLSQLGGD

SEQ ID NO: 292 - protein, 1541 aa, synthetic construct
  REGION 1..1541: note = 116.3 Cas9 TadAins C-term truncate 790 polypeptide sequence
MDKKYSIGLAIGTNSVGWAVITDEYKVPSKKFKVLGNTDRHSIKKNLIGALLFDSGETAEATRLKRTARRRYTRRKNRICYLQEIFSNEMAKVDDSFFHRLEESFLVEEDKKHERHPIFGNIVDEVAYHEKYPTIYHLRKKLVDSTDKADLRLIYLALAHMIKFRGHFLIEGDLNPDNSDVDKLFIQLVQTYNQLFEENPINASGVDAKAILSARLSKSRRLENLIAQLPGEKKNGLFGNLIALSLGLTPNFKSNFDLAEDAKLQLSKDTYDDDLDNLLAQIGDQYADLFLAAKNLSDAILLSDILRVNTEITKAPLSASMIKRYDEHHQDLTLLKALVRQQLPEKYKEIFFDQSKNGYAGYIDGGASQEEFYKFIKPILEKMDGTEELLVKLNREDLLRKQRTFDNGSIPHQIHLGELHAILRRQEDFYPFLKDNREKIEKILTFRIPYYVGPLARGNSRFAWMTRKSEETITPWNFEEVVDKGASAQSFIERMTNFDKNLPNEKVLPKHSLLYEYFTVYNELTKVKYVTEGMRKPAFLSGEQKKAIVDLLFKTNRKVTVKQLKEDYFKKIECFDSVEISGVEDRFNASLGTYHDLLKIIKDKDFLDNEENEDILEDIVLTLTLFEDREMIEERLKTYAHLFDDKVMKQLKRRRYTGWGRLSRKLINGIRDKQSGKTILDFLKSDGFANRNFMQLIHDDSLTFKEDIQKAQVSGQGDSLHEHIANLAGSPAIKKGILQTVKVVDELVKVMGRHKPENIVIEMARENQTTQKGQKNSRERMKRIEEGIKEGSSGSETPGTSESATPESSGSEVEFSHEYWMRHALTLAKRARDEREVPVGAVLVLNNRVIGEGWNRAIGLHDPTAHAEIMALRQGGLVMQNYRLIDATLYVTFEPCVMCAGAMIHSRIGRVVFGVRNAKTGAAGSLMDVLHYPGMNHRVEITEGILADECAALLCYFFRMPRQLGSQILKEHPVENTQLQNEKLYLYYLQNGRDMYVDQELDINRLSDYDVDHIVPQSFLKDDSIDNKVLTRSDKNRGKSDNVPSEEVVKKMKNYWRQLLNAKLITQRKFDNLTKAERGGLSELDKAGFIKRQLVETRQITKHVAQILDSRMNTKYDENDKLIREVKVITLKSKLVSDFRKDFQFYKVREINNYHHAHDAYLNAVVGTALIKKYPKLESEFVYGDYKVYDVRKMIAKSEQEIGKATAKYFFYSNIMNFFKTEITLANGEIRKRPLIETNGETGEIVWDKGRDFATVRKVLSMPQVNIVKKTEVQTGGFSKESILPKRNSDKLIARKKDWDPKKYGGFDSPTVAYSVLVVAKVEKGKSKKLKSVKELLGITIMERSSFEKNPIDFLEAKGYKEVKKDLIIKLPKYSLFELENGRKRMLASAGELQKGNELALPSKYVNFLYLASHYEKLKGSPEDNEQKQLFVEQHKHYLDEIIEQISEFSKRVILADANLDKVLSAYNKHRDKPIREQAENIIHLFTLTNLGAPAAFKYFDTTIDRKRYTSTKEVLDATLIHQSITGLYETRIDLSQLGGD

SEQ ID NO: 293 - protein, 1484 aa, synthetic construct
  REGION 1..1484: note = 117 Cas9 delta 1017-1069 polypeptide sequence
MDKKYSIGLAIGTNSVGWAVITDEYKVPSKKFKVLGNTDRHSIKKNLIGALLFDSGETAEATRLKRTARRRYTRRKNRICYLQEIFSNEMAKVDDSFFHRLEESFLVEEDKKHERHPIFGNIVDEVAYHEKYPTIYHLRKKLVDSTDKADLRLIYLALAHMIKFRGHFLIEGDLNPDNSDVDKLFIQLVQTYNQLFEENPINASGVDAKAILSARLSKSRRLENLIAQLPGEKKNGLFGNLIALSLGLTPNFKSNFDLAEDAKLQLSKDTYDDDLDNLLAQIGDQYADLFLAAKNLSDAILLSDILRVNTEITKAPLSASMIKRYDEHHQDLTLLKALVRQQLPEKYKEIFFDQSKNGYAGYIDGGASQEEFYKFIKPILEKMDGTEELLVKLNREDLLRKQRTFDNGSIPHQIHLGELHAILRRQEDFYPFLKDNREKIEKILTFRIPYYVGPLARGNSRFAWMTRKSEETITPWNFEEVVDKGASAQSFIERMTNFDKNLPNEKVLPKHSLLYEYFTVYNELTKVKYVTEGMRKPAFLSGEQKKAIVDLLFKTNRKVTVKQLKEDYFKKIECFDSVEISGVEDRFNASLGTYHDLLKIIKDKDFLDNEENEDILEDIVLTLTLFEDREMIEERLKTYAHLFDDKVMKQLKRRRYTGWGRLSRKLINGIRDKQSGKTILDFLKSDGFANRNFMQLIHDDSLTFKEDIQKAQVSGQGDSLHEHIANLAGSPAIKKGILQTVKVVDELVKVMGRHKPENIVIEMARENQTTQKGQKNSRERMKRIEEGIKELGSQILKEHPVENTQLQNEKLYLYYLQNGRDMYVDQELDINRLSDYDVDHIVPQSFLKDDSIDNKVLTRSDKNRGKSDNVPSEEVVKKMKNYWRQLLNAKLITQRKFDNLTKAERGGLSELDKAGFIKRQLVETRQITKHVAQILDSRMNTKYDENDKLIREVKVITLKSKLVSDFRKDFQFYKVREINNYHHAHDAYLNAVVGTALIKKYPKLESEFVYGDYKVYSSGSEVEFSHEYWMRHALTLAKRARDEREVPVGAVLVLNNRVIGEGWNRAIGLHDPTAHAEIMALRQGGLVMQNYRLIDATLYVTFEPCVMCAGAMIHSRIGRVVFGVRNAKTGAAGSLMDVLHYPGMNHRVEITEGILADECAALLCYFFRMPRQVFNAQKKAQSSTDGEIVWDKGRDFATVRKVLSMPQVNIVKKTEVQTGGFSKESILPKRNSDKLIARKKDWDPKKYGGFDSPTVAYSVLVVAKVEKGKSKKLKSVKELLGITIMERSSFEKNPIDFLEAKGYKEVKKDLIIKLPKYSLFELENGRKRMLASAGELQKGNELALPSKYVNFLYLASHYEKLKGSPEDNEQKQLFVEQHKHYLDEIIEQISEFSKRVILADANLDKVLSAYNKHRDKPIREQAENIIHLFTLTNLGAPAAFKYFDTTIDRKRYTSTKEVLDATLIHQSITGLYETRIDLSQLGGD

SEQ ID NO: 294 - protein, 1554 aa, synthetic construct
  REGION 1..1554: note = 118 Cas9 TadA-CP116ins 1067 polypeptide sequence
MDKKYSIGLAIGTNSVGWAVITDEYKVPSKKFKVLGNTDRHSIKKNLIGALLFDSGETAEATRLKRTARRRYTRRKNRICYLQEIFSNEMAKVDDSFFHRLEESFLVEEDKKHERHPIFGNIVDEVAYHEKYPTIYHLRKKLVDSTDKADLRLIYLALAHMIKFRGHFLIEGDLNPDNSDVDKLFIQLVQTYNQLFEENPINASGVDAKAILSARLSKSRRLENLIAQLPGEKKNGLFGNLIALSLGLTPNFKSNFDLAEDAKLQLSKDTYDDDLDNLLAQIGDQYADLFLAAKNLSDAILLSDILRVNTEITKAPLSASMIKRYDEHHQDLTLLKALVRQQLPEKYKEIFFDQSKNGYAGYIDGGASQEEFYKFIKPILEKMDGTEELLVKLNREDLLRKQRTFDNGSIPHQIHLGELHAILRRQEDFYPFLKDNREKIEKILTFRIPYYVGPLARGNSRFAWMTRKSEETITPWNFEEVVDKGASAQSFIERMTNFDKNLPNEKVLPKHSLLYEYFTVYNELTKVKYVTEGMRKPAFLSGEQKKAIVDLLFKTNRKVTVKQLKEDYFKKIECFDSVEISGVEDRFNASLGTYHDLLKIIKDKDFLDNEENEDILEDIVLTLTLFEDREMIEERLKTYAHLFDDKVMKQLKRRRYTGWGRLSRKLINGIRDKQSGKTILDFLKSDGFANRNFMQLIHDDSLTFKEDIQKAQVSGQGDSLHEHIANLAGSPAIKKGILQTVKVVDELVKVMGRHKPENIVIEMARENQTTQKGQKNSRERMKRIEEGIKELGSQILKEHPVENTQLQNEKLYLYYLQNGRDMYVDQELDINRLSDYDVDHIVPQSFLKDDSIDNKVLTRSDKNRGKSDNVPSEEVVKKMKNYWRQLLNAKLITQRKFDNLTKAERGGLSELDKAGFIKRQLVETRQITKHVAQILDSRMNTKYDENDKLIREVKVITLKSKLVSDFRKDFQFYKVREINNYHHAHDAYLNAVVGTALIKKYPKLESEFVYGDYKVYDVRKMIAKSEQEIGKATAKYFFYSNIMNFFKTEITLANGEIRKRPLIETNMNHRVEITEGILADECAALLCYFFRMPRQVFNAQKKAQSSTDGSSGSETPGTSESATPESSGSEVEFSHEYWMRHALTLAKRARDEREVPVGAVLVLNNRVIGEGWNRAIGLHDPTAHAEIMALRQGGLVMQNYRLIDATLYVTFEPCVMCAGAMIHSRIGRVVFGVRNAKTGAAGSLMDVLHYPGGETGEIVWDKGRDFATVRKVLSMPQVNIVKKTEVQTGGFSKESILPKRNSDKLIARKKDWDPKKYGGFDSPTVAYSVLVVAKVEKGKSKKLKSVKELLGITIMERSSFEKNPIDFLEAKGYKEVKKDLIIKLPKYSLFELENGRKRMLASAGELQKGNELALPSKYVNFLYLASHYEKLKGSPEDNEQKQLFVEQHKHYLDEIIEQISEFSKRVILADANLDKVLSAYNKHRDKPIREQAENIIHLFTLTNLGAPAAFKYFDTTIDRKRYTSTKEVLDATLIHQSITGLYETRIDLSQLGGD

SEQ ID NO: 295 - protein, 1554 aa, synthetic construct
  REGION 1..1554: note = 119 Cas9 TadAins 701 polypeptide sequence
MDKKYSIGLAIGTNSVGWAVITDEYKVPSKKFKVLGNTDRHSIKKNLIGALLFDSGETAEATRLKRTARRRYTRRKNRICYLQEIFSNEMAKVDDSFFHRLEESFLVEEDKKHERHPIFGNIVDEVAYHEKYPTIYHLRKKLVDSTDKADLRLIYLALAHMIKFRGHFLIEGDLNPDNSDVDKLFIQLVQTYNQLFEENPINASGVDAKAILSARLSKSRRLENLIAQLPGEKKNGLFGNLIALSLGLTPNFKSNFDLAEDAKLQLSKDTYDDDLDNLLAQIGDQYADLFLAAKNLSDAILLSDILRVNTEITKAPLSASMIKRYDEHHQDLTLLKALVRQQLPEKYKEIFFDQSKNGYAGYIDGGASQEEFYKFIKPILEKMDGTEELLVKLNREDLLRKQRTFDNGSIPHQIHLGELHAILRRQEDFYPFLKDNREKIEKILTFRIPYYVGPLARGNSRFAWMTRKSEETITPWNFEEVVDKGASAQSFIERMTNFDKNLPNEKVLPKHSLLYEYFTVYNELTKVKYVTEGMRKPAFLSGEQKKAIVDLLFKTNRKVTVKQLKEDYFKKIECFDSVEISGVEDRFNASLGTYHDLLKIIKDKDFLDNEENEDILEDIVLTLTLFEDREMIEERLKTYAHLFDDKVMKQLKRRRYTGWGRLSRKLINGIRDKQSGKTILDFLKSDGFANRNFMQLIHDDSGSSGSETPGTSESATPESSGSEVEFSHEYWMRHALTLAKRARDEREVPVGAVLVLNNRVIGEGWNRAIGLHDPTAHAEIMALRQGGLVMQNYRLIDATLYVTFEPCVMCAGAMIHSRIGRVVFGVRNAKTGAAGSLMDVLHYPGMNHRVEITEGILADECAALLCYFFRMPRQVFNAQKKAQSSTDLTFKEDIQKAQVSGQGDSLHEHIANLAGSPAIKKGILQTVKVVDELVKVMGRHKPENIVIEMARENQTTQKGQKNSRERMKRIEEGIKELGSQILKEHPVENTQLQNEKLYLYYLQNGRDMYVDQELDINRLSDYDVDHIVPQSFLKDDSIDNKVLTRSDKNRGKSDNVPSEEVVKKMKNYWRQLLNAKLITQRKFDNLTKAERGGLSELDKAGFIKRQLVETRQITKHVAQILDSRMNTKYDENDKLIREVKVITLKSKLVSDFRKDFQFYKVREINNYHHAHDAYLNAVVGTALIKKYPKLESEFVYGDYKVYDVRKMIAKSEQEIGKATAKYFFYSNIMNFFKTEITLANGEIRKRPLIETNGETGEIVWDKGRDFATVRKVLSMPQVNIVKKTEVQTGGFSKESILPKRNSDKLIARKKDWDPKKYGGFDSPTVAYSVLVVAKVEKGKSKKLKSVKELLGITIMERSSFEKNPIDFLEAKGYKEVKKDLIIKLPKYSLFELENGRKRMLASAGELQKGNELALPSKYVNFLYLASHYEKLKGSPEDNEQKQLFVEQHKHYLDEIIEQISEFSKRVILADANLDKVLSAYNKHRDKPIREQAENIIHLFTLTNLGAPAAFKYFDTTIDRKRYTSTKEVLDATLIHQSITGLYETRIDLSQLGGD

SEQ ID NO: 296 - protein, 1554 aa, synthetic construct
  REGION 1..1554: note = 120 Cas9 TadACP136ins 1248 polypeptide sequence
MDKKYSIGLAIGTNSVGWAVITDEYKVPSKKFKVLGNTDRHSIKKNLIGALLFDSGETAEATRLKRTARRRYTRRKNRICYLQEIFSNEMAKVDDSFFHRLEESFLVEEDKKHERHPIFGNIVDEVAYHEKYPTIYHLRKKLVDSTDKADLRLIYLALAHMIKFRGHFLIEGDLNPDNSDVDKLFIQLVQTYNQLFEENPINASGVDAKAILSARLSKSRRLENLIAQLPGEKKNGLFGNLIALSLGLTPNFKSNFDLAEDAKLQLSKDTYDDDLDNLLAQIGDQYADLFLAAKNLSDAILLSDILRVNTEITKAPLSASMIKRYDEHHQDLTLLKALVRQQLPEKYKEIFFDQSKNGYAGYIDGGASQEEFYKFIKPILEKMDGTEELLVKLNREDLLRKQRTFDNGSIPHQIHLGELHAILRRQEDFYPFLKDNREKIEKILTFRIPYYVGPLARGNSRFAWMTRKSEETITPWNFEEVVDKGASAQSFIERMTNFDKNLPNEKVLPKHSLLYEYFTVYNELTKVKYVTEGMRKPAFLSGEQKKAIVDLLFKTNRKVTVKQLKEDYFKKIECFDSVEISGVEDRFNASLGTYHDLLKIIKDKDFLDNEENEDILEDIVLTLTLFEDREMIEERLKTYAHLFDDKVMKQLKRRRYTGWGRLSRKLINGIRDKQSGKTILDFLKSDGFANRNFMQLIHDDSLTFKEDIQKAQVSGQGDSLHEHIANLAGSPAIKKGILQTVKVVDELVKVMGRHKPENIVIEMARENQTTQKGQKNSRERMKRIEEGIKELGSQILKEHPVENTQLQNEKLYLYYLQNGRDMYVDQELDINRLSDYDVDHIVPQSFLKDDSIDNKVLTRSDKNRGKSDNVPSEEVVKKMKNYWRQLLNAKLITQRKFDNLTKAERGGLSELDKAGFIKRQLVETRQITKHVAQILDSRMNTKYDENDKLIREVKVITLKSKLVSDFRKDFQFYKVREINNYHHAHDAYLNAVVGTALIKKYPKLESEFVYGDYKVYDVRKMIAKSEQEIGKATAKYFFYSNIMNFFKTEITLANGEIRKRPLIETNGETGEIVWDKGRDFATVRKVLSMPQVNIVKKTEVQTGGFSKESILPKRNSDKLIARKKDWDPKKYGGFDSPTVAYSVLVVAKVEKGKSKKLKSVKELLGITIMERSSFEKNPIDFLEAKGYKEVKKDLIIKLPKYSLFELENGRKRMLASAGELQKGNELALPSKYVNFLYLASHYEKLKGSMNHRVEITEGILADECAALLCYFFRMPRQVFNAQKKAQSSTDGSSGSETPGTSESATPESSGSEVEFSHEYWMRHALTLAKRARDEREVPVGAVLVLNNRVIGEGWNRAIGLHDPTAHAEIMALRQGGLVMQNYRLIDATLYVTFEPCVMCAGAMIHSRIGRVVFGVRNAKTGAAGSLMDVLHYPGPEDNEQKQLFVEQHKHYLDEIIEQISEFSKRVILADANLDKVLSAYNKHRDKPIREQAENIIHLFTLTNLGAPAAFKYFDTTIDRKRYTSTKEVLDATLIHQSITGLYETRIDLSQLGGD

SEQ ID NO: 297 - protein, 1554 aa, synthetic construct
  REGION 1..1554: note = 121 Cas9 TadACP136ins 1052 polypeptide sequence
MDKKYSIGLAIGTNSVGWAVITDEYKVPSKKFKVLGNTDRHSIKKNLIGALLFDSGETAEATRLKRTARRRYTRRKNRICYLQEIFSNEMAKVDDSFFHRLEESFLVEEDKKHERHPIFGNIVDEVAYHEKYPTIYHLRKKLVDSTDKADLRLIYLALAHMIKFRGHFLIEGDLNPDNSDVDKLFIQLVQTYNQLFEENPINASGVDAKAILSARLSKSRRLENLIAQLPGEKKNGLFGNLIALSLGLTPNFKSNFDLAEDAKLQLSKDTYDDDLDNLLAQIGDQYADLFLAAKNLSDAILLSDILRVNTEITKAPLSASMIKRYDEHHQDLTLLKALVRQQLPEKYKEIFFDQSKNGYAGYIDGGASQEEFYKFIKPILEKMDGTEELLVKLNREDLLRKQRTFDNGSIPHQIHLGELHAILRRQEDFYPFLKDNREKIEKILTFRIPYYVGPLARGNSRFAWMTRKSEETITPWNFEEVVDKGASAQSFIERMTNFDKNLPNEKVLPKHSLLYEYFTVYNELTKVKYVTEGMRKPAFLSGEQKKAIVDLLFKTNRKVTVKQLKEDYFKKIECFDSVEISGVEDRFNASLGTYHDLLKIIKDKDFLDNEENEDILEDIVLTLTLFEDREMIEERLKTYAHLFDDKVMKQLKRRRYTGWGRLSRKLINGIRDKQSGKTILDFLKSDGFANRNFMQLIHDDSLTFKEDIQKAQVSGQGDSLHEHIANLAGSPAIKKGILQTVKVVDELVKVMGRHKPENIVIEMARENQTTQKGQKNSRERMKRIEEGIKELGSQILKEHPVENTQLQNEKLYLYYLQNGRDMYVDQELDINRLSDYDVDHIVPQSFLKDDSIDNKVLTRSDKNRGKSDNVPSEEVVKKMKNYWRQLLNAKLITQRKFDNLTKAERGGLSELDKAGFIKRQLVETRQITKHVAQILDSRMNTKYDENDKLIREVKVITLKSKLVSDFRKDFQFYKVREINNYHHAHDAYLNAVVGTALIKKYPKLESEFVYGDYKVYDVRKMIAKSEQEIGKATAKYFFYSNIMNFFKTEITLAMNHRVEITEGILADECAALLCYFFRMPRQVFNAQKKAQSSTDGSSGSETPGTSESATPESSGSEVEFSHEYWMRHALTLAKRARDEREVPVGAVLVLNNRVIGEGWNRAIGLHDPTAHAEIMALRQGGLVMQNYRLIDATLYVTFEPCVMCAGAMIHSRIGRVVFGVRNAKTGAAGSLMDVLHYPGNGEIRKRPLIETNGETGEIVWDKGRDFATVRKVLSMPQVNIVKKTEVQTGGFSKESILPKRNSDKLIARKKDWDPKKYGGFDSPTVAYSVLVVAKVEKGKSKKLKSVKELLGITIMERSSFEKNPIDFLEAKGYKEVKKDLIIKLPKYSLFELENGRKRMLASAGELQKGNELALPSKYVNFLYLASHYEKLKGSPEDNEQKQLFVEQHKHYLDEIIEQISEFSKRVILADANLDKVLSAYNKHRDKPIREQAENIIHLFTLTNLGAPAAFKYFDTTIDRKRYTSTKEVLDATLIHQSITGLYETRIDLSQLGGD

SEQ ID NO: 298 - protein, 1554 aa, synthetic construct
  REGION 1..1554: note = 122 Cas9 TadACP136ins 1041 polypeptide sequence
MDKKYSIGLAIGTNSVGWAVITDEYKVPSKKFKVLGNTDRHSIKKNLIGALLFDSGETAEATRLKRTARRRYTRRKNRICYLQEIFSNEMAKVDDSFFHRLEESFLVEEDKKHERHPIFGNIVDEVAYHEKYPTIYHLRKKLVDSTDKADLRLIYLALAHMIKFRGHFLIEGDLNPDNSDVDKLFIQLVQTYNQLFEENPINASGVDAKAILSARLSKSRRLENLIAQLPGEKKNGLFGNLIALSLGLTPNFKSNFDLAEDAKLQLSKDTYDDDLDNLLAQIGDQYADLFLAAKNLSDAILLSDILRVNTEITKAPLSASMIKRYDEHHQDLTLLKALVRQQLPEKYKEIFFDQSKNGYAGYIDGGASQEEFYKFIKPILEKMDGTEELLVKLNREDLLRKQRTFDNGSIPHQIHLGELHAILRRQEDFYPFLKDNREKIEKILTFRIPYYVGPLARGNSRFAWMTRKSEETITPWNFEEVVDKGASAQSFIERMTNFDKNLPNEKVLPKHSLLYEYFTVYNELTKVKYVTEGMRKPAFLSGEQKKAIVDLLFKTNRKVTVKQLKEDYFKKIECFDSVEISGVEDRFNASLGTYHDLLKIIKDKDFLDNEENEDILEDIVLTLTLFEDREMIEERLKTYAHLFDDKVMKQLKRRRYTGWGRLSRKLINGIRDKQSGKTILDFLKSDGFANRNFMQLIHDDSLTFKEDIQKAQVSGQGDSLHEHIANLAGSPAIKKGILQTVKVVDELVKVMGRHKPENIVIEMARENQTTQKGQKNSRERMKRIEEGIKELGSQILKEHPVENTQLQNEKLYLYYLQNGRDMYVDQELDINRLSDYDVDHIVPQSFLKDDSIDNKVLTRSDKNRGKSDNVPSEEVVKKMKNYWRQLLNAKLITQRKFDNLTKAERGGLSELDKAGFIKRQLVETRQITKHVAQILDSRMNTKYDENDKLIREVKVITLKSKLVSDFRKDFQFYKVREINNYHHAHDAYLNAVVGTALIKKYPKLESEFVYGDYKVYDVRKMIAKSEQEIGKATAKYFFYSMNHRVEITEGILADECAALLCYFFRMPRQVFNAQKKAQSSTDGSSGSETPGTSESATPESSGSEVEFSHEYWMRHALTLAKRARDEREVPVGAVLVLNNRVIGEGWNRAIGLHDPTAHAEIMALRQGGLVMQNYRLIDATLYVTFEPCVMCAGAMIHSRIGRVVFGVRNAKTGAAGSLMDVLHYPGNIMNFFKTEITLANGEIRKRPLIETNGETGEIVWDKGRDFATVRKVLSMPQVNIVKKTEVQTGGFSKESILPKRNSDKLIARKKDWDPKKYGGFDSPTVAYSVLVVAKVEKGKSKKLKSVKELLGITIMERSSFEKNPIDFLEAKGYKEVKKDLIIKLPKYSLFELENGRKRMLASAGELQKGNELALPSKYVNFLYLASHYEKLKGSPEDNEQKQLFVEQHKHYLDEIIEQISEFSKRVILADANLDKVLSAYNKHRDKPIREQAENIIHLFTLTNLGAPAAFKYFDTTIDRKRYTSTKEVLDATLIHQSITGLYETRIDLSQLGGD

SEQ ID NO: 299 - protein, 1554 aa, synthetic construct
  REGION 1..1554: note = 123 Cas9 TadACP139ins 1299 polypeptide sequence
MDKKYSIGLAIGTNSVGWAVITDEYKVPSKKFKVLGNTDRHSIKKNLIGALLFDSGETAEATRLKRTARRRYTRRKNRICYLQEIFSNEMAKVDDSFFHRLEESFLVEEDKKHERHPIFGNIVDEVAYHEKYPTIYHLRKKLVDSTDKADLRLIYLALAHMIKFRGHFLIEGDLNPDNSDVDKLFIQLVQTYNQLFEENPINASGVDAKAILSARLSKSRRLENLIAQLPGEKKNGLFGNLIALSLGLTPNFKSNFDLAEDAKLQLSKDTYDDDLDNLLAQIGDQYADLFLAAKNLSDAILLSDILRVNTEITKAPLSASMIKRYDEHHQDLTLLKALVRQQLPEKYKEIFFDQSKNGYAGYIDGGASQEEFYKFIKPILEKMDGTEELLVKLNREDLLRKQRTFDNGSIPHQIHLGELHAILRRQEDFYPFLKDNREKIEKILTFRIPYYVGPLARGNSRFAWMTRKSEETITPWNFEEVVDKGASAQSFIERMTNFDKNLPNEKVLPKHSLLYEYFTVYNELTKVKYVTEGMRKPAFLSGEQKKAIVDLLFKTNRKVTVKQLKEDYFKKIECFDSVEISGVEDRFNASLGTYHDLLKIIKDKDFLDNEENEDILEDIVLTLTLFEDREMIEERLKTYAHLFDDKVMKQLKRRRYTGWGRLSRKLINGIRDKQSGKTILDFLKSDGFANRNFMQLIHDDSLTFKEDIQKAQVSGQGDSLHEHIANLAGSPAIKKGILQTVKVVDELVKVMGRHKPENIVIEMARENQTTQKGQKNSRERMKRIEEGIKELGSQILKEHPVENTQLQNEKLYLYYLQNGRDMYVDQELDINRLSDYDVDHIVPQSFLKDDSIDNKVLTRSDKNRGKSDNVPSEEVVKKMKNYWRQLLNAKLITQRKFDNLTKAERGGLSELDKAGFIKRQLVETRQITKHVAQILDSRMNTKYDENDKLIREVKVITLKSKLVSDFRKDFQFYKVREINNYHHAHDAYLNAVVGTALIKKYPKLESEFVYGDYKVYDVRKMIAKSEQEIGKATAKYFFYSNIMNFFKTEITLANGEIRKRPLIETNGETGEIVWDKGRDFATVRKVLSMPQVNIVKKTEVQTGGFSKESILPKRNSDKLIARKKDWDPKKYGGFDSPTVAYSVLVVAKVEKGKSKKLKSVKELLGITIMERSSFEKNPIDFLEAKGYKEVKKDLIIKLPKYSLFELENGRKRMLASAGELQKGNELALPSKYVNFLYLASHYEKLKGSPEDNEQKQLFVEQHKHYLDEIIEQISEFSKRVILADANLDKVLSAYNKHRMNHRVEITEGILADECAALLCYFFRMPRQVFNAQKKAQSSTDGSSGSETPGTSESATPESSGSEVEFSHEYWMRHALTLAKRARDEREVPVGAVLVLNNRVIGEGWNRAIGLHDPTAHAEIMALRQGGLVMQNYRLIDATLYVTFEPCVMCAGAMIHSRIGRVVFGVRNAKTGAAGSLMDVLHYPGDKPIREQAENIIHLFTLTNLGAPAAFKYFDTTIDRKRYTSTKEVLDATLIHQSITGLYETRIDLSQLGGD

SEQ ID NO: 300 - protein, 1454 aa, synthetic construct
  REGION 1..1454: note = 124 Cas9 delta 792-872TadAins polypeptide sequence
MDKKYSIGLAIGTNSVGWAVITDEYKVPSKKFKVLGNTDRHSIKKNLIGALLFDSGETAEATRLKRTARRRYTRRKNRICYLQEIFSNEMAKVDDSFFHRLEESFLVEEDKKHERHPIFGNIVDEVAYHEKYPTIYHLRKKLVDSTDKADLRLIYLALAHMIKFRGHFLIEGDLNPDNSDVDKLFIQLVQTYNQLFEENPINASGVDAKAILSARLSKSRRLENLIAQLPGEKKNGLFGNLIALSLGLTPNFKSNFDLAEDAKLQLSKDTYDDDLDNLLAQIGDQYADLFLAAKNLSDAILLSDILRVNTEITKAPLSASMIKRYDEHHQDLTLLKALVRQQLPEKYKEIFFDQSKNGYAGYIDGGASQEEFYKFIKPILEKMDGTEELLVKLNREDLLRKQRTFDNGSIPHQIHLGELHAILRRQEDFYPFLKDNREKIEKILTFRIPYYVGPLARGNSRFAWMTRKSEETITPWNFEEVVDKGASAQSFIERMTNFDKNLPNEKVLPKHSLLYEYFTVYNELTKVKYVTEGMRKPAFLSGEQKKAIVDLLFKTNRKVTVKQLKEDYFKKIECFDSVEISGVEDRFNASLGTYHDLLKIIKDKDFLDNEENEDILEDIVLTLTLFEDREMIEERLKTYAHLFDDKVMKQLKRRRYTGWGRLSRKLINGIRDKQSGKTILDFLKSDGFANRNFMQLIHDDSLTFKEDIQKAQVSGQGDSLHEHIANLAGSPAIKKGILQTVKVVDELVKVMGRHKPENIVIEMARENQTTQKGQKNSRERMKRIEEGIKELGSEVEFSHEYWMRHALTLAKRARDEREVPVGAVLVLNNRVIGEGWNRAIGLHDPTAHAEIMALRQGGLVMQNYRLIDATLYVTFEPCVMCAGAMIHSRIGRVVFGVRNAKTGAAGSLMDVLHYPGMNHRVEITEGILADECAALLCYFFRMPRQVFNAQKKAQSSTDEEVVKKMKNYWRQLLNAKLITQRKFDNLTKAERGGLSELDKAGFIKRQLVETRQITKHVAQILDSRMNTKYDENDKLIREVKVITLKSKLVSDFRKDFQFYKVREINNYHHAHDAYLNAVVGTALIKKYPKLESEFVYGDYKVYDVRKMIAKSEQEIGKATAKYFFYSNIMNFFKTEITLANGEIRKRPLIETNGETGEIVWDKGRDFATVRKVLSMPQVNIVKKTEVQTGGFSKESILPKRNSDKLIARKKDWDPKKYGGFDSPTVAYSVLVVAKVEKGKSKKLKSVKELLGITIMERSSFEKNPIDFLEAKGYKEVKKDLIIKLPKYSLFELENGRKRMLASAGELQKGNELALPSKYVNFLYLASHYEKLKGSPEDNEQKQLFVEQHKHYLDEIIEQISEFSKRVILADANLDKVLSAYNKHRDKPIREQAENIIHLFTLTNLGAPAAFKYFDTTIDRKRYTSTKEVLDATLIHQSITGLYETRIDLSQLGGD

SEQ ID NO: 301 - protein, 1420 aa, synthetic construct
  REGION 1..1420: note = 125 Cas9 delta 792-906TadAins polypeptide sequence
MDKKYSIGLAIGTNSVGWAVITDEYKVPSKKFKVLGNTDRHSIKKNLIGALLFDSGETAEATRLKRTARRRYTRRKNRICYLQEIFSNEMAKVDDSFFHRLEESFLVEEDKKHERHPIFGNIVDEVAYHEKYPTIYHLRKKLVDSTDKADLRLIYLALAHMIKFRGHFLIEGDLNPDNSDVDKLFIQLVQTYNQLFEENPINASGVDAKAILSARLSKSRRLENLIAQLPGEKKNGLFGNLIALSLGLTPNFKSNFDLAEDAKLQLSKDTYDDDLDNLLAQIGDQYADLFLAAKNLSDAILLSDILRVNTEITKAPLSASMIKRYDEHHQDLTLLKALVRQQLPEKYKEIFFDQSKNGYAGYIDGGASQEEFYKFIKPILEKMDGTEELLVKLNREDLLRKQRTFDNGSIPHQIHLGELHAILRRQEDFYPFLKDNREKIEKILTFRIPYYVGPLARGNSRFAWMTRKSEETITPWNFEEVVDKGASAQSFIERMTNFDKNLPNEKVLPKHSLLYEYFTVYNELTKVKYVTEGMRKPAFLSGEQKKAIVDLLFKTNRKVTVKQLKEDYFKKIECFDSVEISGVEDRFNASLGTYHDLLKIIKDKDFLDNEENEDILEDIVLTLTLFEDREMIEERLKTYAHLFDDKVMKQLKRRRYTGWGRLSRKLINGIRDKQSGKTILDFLKSDGFANRNFMQLIHDDSLTFKEDIQKAQVSGQGDSLHEHIANLAGSPAIKKGILQTVKVVDELVKVMGRHKPENIVIEMARENQTTQKGQKNSRERMKRIEEGIKELGSEVEFSHEYWMRHALTLAKRARDEREVPVGAVLVLNNRVIGEGWNRAIGLHDPTAHAEIMALRQGGLVMQNYRLIDATLYVTFEPCVMCAGAMIHSRIGRVVFGVRNAKTGAAGSLMDVLHYPGMNHRVEITEGILADECAALLCYFFRMPRQVFNAQKKAQSSTDGLSELDKAGFIKRQLVETRQITKHVAQILDSRMNTKYDENDKLIREVKVITLKSKLVSDFRKDFQFYKVREINNYHHAHDAYLNAVVGTALIKKYPKLESEFVYGDYKVYDVRKMIAKSEQEIGKATAKYFFYSNIMNFFKTEITLANGEIRKRPLIETNGETGEIVWDKGRDFATVRKVLSMPQVNIVKKTEVQTGGFSKESILPKRNSDKLIARKKDWDPKKYGGFDSPTVAYSVLVVAKVEKGKSKKLKSVKELLGITIMERSSFEKNPIDFLEAKGYKEVKKDLIIKLPKYSLFELENGRKRMLASAGELQKGNELALPSKYVNFLYLASHYEKLKGSPEDNEQKQLFVEQHKHYLDEIIEQISEFSKRVILADANLDKVLSAYNKHRDKPIREQAENIIHLFTLTNLGAPAAFKYFDTTIDRKRYTSTKEVLDATLIHQSITGLYETRIDLSQLGGD

SEQ ID NO: 302 - protein, 1554 aa, synthetic construct
  REGION 1..1554: note = 126 TadA CP65ins 1003 polypeptide sequence
MDKKYSIGLAIGTNSVGWAVITDEYKVPSKKFKVLGNTDRHSIKKNLIGALLFDSGETAEATRLKRTARRRYTRRKNRICYLQEIFSNEMAKVDDSFFHRLEESFLVEEDKKHERHPIFGNIVDEVAYHEKYPTIYHLRKKLVDSTDKADLRLIYLALAHMIKFRGHFLIEGDLNPDNSDVDKLFIQLVQTYNQLFEENPINASGVDAKAILSARLSKSRRLENLIAQLPGEKKNGLFGNLIALSLGLTPNFKSNFDLAEDAKLQLSKDTYDDDLDNLLAQIGDQYADLFLAAKNLSDAILLSDILRVNTEITKAPLSASMIKRYDEHHQDLTLLKALVRQQLPEKYKEIFFDQSKNGYAGYIDGGASQEEFYKFIKPILEKMDGTEELLVKLNREDLLRKQRTFDNGSIPHQIHLGELHAILRRQEDFYPFLKDNREKIEKILTFRIPYYVGPLARGNSRFAWMTRKSEETITPWNFEEVVDKGASAQSFIERMTNFDKNLPNEKVLPKHSLLYEYFTVYNELTKVKYVTEGMRKPAFLSGEQKKAIVDLLFKTNRKVTVKQLKEDYFKKIECFDSVEISGVEDRFNASLGTYHDLLKIIKDKDFLDNEENEDILEDIVLTLTLFEDREMIEERLKTYAHLFDDKVMKQLKRRRYTGWGRLSRKLINGIRDKQSGKTILDFLKSDGFANRNFMQLIHDDSLTFKEDIQKAQVSGQGDSLHEHIANLAGSPAIKKGILQTVKVVDELVKVMGRHKPENIVIEMARENQTTQKGQKNSRERMKRIEEGIKELGSQILKEHPVENTQLQNEKLYLYYLQNGRDMYVDQELDINRLSDYDVDHIVPQSFLKDDSIDNKVLTRSDKNRGKSDNVPSEEVVKKMKNYWRQLLNAKLITQRKFDNLTKAERGGLSELDKAGFIKRQLVETRQITKHVAQILDSRMNTKYDENDKLIREVKVITLKSKLVSDFRKDFQFYKVREINNYHHAHDAYLNAVVGTALIKKYPKTAHAEIMALRQGGLVMQNYRLIDATLYVTFEPCVMCAGAMIHSRIGRVVFGVRNAKTGAAGSLMDVLHYPGMNHRVEITEGILADECAALLCYFFRMPRQVFNAQKKAQSSTDGSSGSETPGTSESATPESSGSEVEFSHEYWMRHALTLAKRARDEREVPVGAVLVLNNRVIGEGWNRAIGLHDPLESEFVYGDYKVYDVRKMIAKSEQEIGKATAKYFFYSNIMNFFKTEITLANGEIRKRPLIETNGETGEIVWDKGRDFATVRKVLSMPQVNIVKKTEVQTGGFSKESILPKRNSDKLIARKKDWDPKKYGGFDSPTVAYSVLVVAKVEKGKSKKLKSVKELLGITIMERSSFEKNPIDFLEAKGYKEVKKDLIIKLPKYSLFELENGRKRMLASAGELQKGNELALPSKYVNFLYLASHYEKLKGSPEDNEQKQLFVEQHKHYLDEIIEQISEFSKRVILADANLDKVLSAYNKHRDKPIREQAENIIHLFTLTNLGAPAAFKYFDTTIDRKRYTSTKEVLDATLIHQSITGLYETRIDLSQLGGD

SEQ ID NO: 303 - protein, 1554 aa, synthetic construct
  REGION 1..1554: note = 127 TadA CP65ins 1016 polypeptide sequence
MDKKYSIGLAIGTNSVGWAVITDEYKVPSKKFKVLGNTDRHSIKKNLIGALLFDSGETAEATRLKRTARRRYTRRKNRICYLQEIFSNEMAKVDDSFFHRLEESFLVEEDKKHERHPIFGNIVDEVAYHEKYPTIYHLRKKLVDSTDKADLRLIYLALAHMIKFRGHFLIEGDLNPDNSDVDKLFIQLVQTYNQLFEENPINASGVDAKAILSARLSKSRRLENLIAQLPGEKKNGLFGNLIALSLGLTPNFKSNFDLAEDAKLQLSKDTYDDDLDNLLAQIGDQYADLFLAAKNLSDAILLSDILRVNTEITKAPLSASMIKRYDEHHQDLTLLKALVRQQLPEKYKEIFFDQSKNGYAGYIDGGASQEEFYKFIKPILEKMDGTEELLVKLNREDLLRKQRTFDNGSIPHQIHLGELHAILRRQEDFYPFLKDNREKIEKILTFRIPYYVGPLARGNSRFAWMTRKSEETITPWNFEEVVDKGASAQSFIERMTNFDKNLPNEKVLPKHSLLYEYFTVYNELTKVKYVTEGMRKPAFLSGEQKKAIVDLLFKTNRKVTVKQLKEDYFKKIECFDSVEISGVEDRFNASLGTYHDLLKIIKDKDFLDNEENEDILEDIVLTLTLFEDREMIEERLKTYAHLFDDKVMKQLKRRRYTGWGRLSRKLINGIRDKQSGKTILDFLKSDGFANRNFMQLIHDDSLTFKEDIQKAQVSGQGDSLHEHIANLAGSPAIKKGILQTVKVVDELVKVMGRHKPENIVIEMARENQTTQKGQKNSRERMKRIEEGIKELGSQILKEHPVENTQLQNEKLYLYYLQNGRDMYVDQELDINRLSDYDVDHIVPQSFLKDDSIDNKVLTRSDKNRGKSDNVPSEEVVKKMKNYWRQLLNAKLITQRKFDNLTKAERGGLSELDKAGFIKRQLVETRQITKHVAQILDSRMNTKYDENDKLIREVKVITLKSKLVSDFRKDFQFYKVREINNYHHAHDAYLNAVVGTALIKKYPKLESEFVYGDYKVTAHAEIMALRQGGLVMQNYRLIDATLYVTFEPCVMCAGAMIHSRIGRVVFGVRNAKTGAAGSLMDVLHYPGMNHRVEITEGILADECAALLCYFFRMPRQVFNAQKKAQSSTDGSSGSETPGTSESATPESSGSEVEFSHEYWMRHALTLAKRARDEREVPVGAVLVLNNRVIGEGWNRAIGLHDPYDVRKMIAKSEQEIGKATAKYFFYSNIMNFFKTEITLANGEIRKRPLIETNGETGEIVWDKGRDFATVRKVLSMPQVNIVKKTEVQTGGFSKESILPKRNSDKLIARKKDWDPKKYGGFDSPTVAYSVLVVAKVEKGKSKKLKSVKELLGITIMERSSFEKNPIDFLEAKGYKEVKKDLIIKLPKYSLFELENGRKRMLASAGELQKGNELALPSKYVNFLYLASHYEKLKGSPEDNEQKQLFVEQHKHYLDEIIEQISEFSKRVILADANLDKVLSAYNKHRDKPIREQAENIIHLFTLTNLGAPAAFKYFDTTIDRKRYTSTKEVLDATLIHQSITGLYETRIDLSQLGGD

SEQ ID NO: 304 - protein, 1554 aa, synthetic construct
  REGION 1..1554: note = 128 TadA CP65ins 1022 polypeptide sequence
MDKKYSIGLAIGTNSVGWAVITDEYKVPSKKFKVLGNTDRHSIKKNLIGALLFDSGETAEATRLKRTARRRYTRRKNRICYLQEIFSNEMAKVDDSFFHRLEESFLVEEDKKHERHPIFGNIVDEVAYHEKYPTIYHLRKKLVDSTDKADLRLIYLALAHMIKFRGHFLIEGDLNPDNSDVDKLFIQLVQTYNQLFEENPINASGVDAKAILSARLSKSRRLENLIAQLPGEKKNGLFGNLIALSLGLTPNFKSNFDLAEDAKLQLSKDTYDDDLDNLLAQIGDQYADLFLAAKNLSDAILLSDILRVNTEITKAPLSASMIKRYDEHHQDLTLLKALVRQQLPEKYKEIFFDQSKNGYAGYIDGGASQEEFYKFIKPILEKMDGTEELLVKLNREDLLRKQRTFDNGSIPHQIHLGELHAILRRQEDFYPFLKDNREKIEKILTFRIPYYVGPLARGNSRFAWMTRKSEETITPWNFEEVVDKGASAQSFIERMTNFDKNLPNEKVLPKHSLLYEYFTVYNELTKVKYVTEGMRKPAFLSGEQKKAIVDLLFKTNRKVTVKQLKEDYFKKIECFDSVEISGVEDRFNASLGTYHDLLKIIKDKDFLDNEENEDILEDIVLTLTLFEDREMIEERLKTYAHLFDDKVMKQLKRRRYTGWGRLSRKLINGIRDKQSGKTILDFLKSDGFANRNFMQLIHDDSLTFKEDIQKAQVSGQGDSLHEHIANLAGSPAIKKGILQTVKVVDELVKVMGRHKPENIVIEMARENQTTQKGQKNSRERMKRIEEGIKELGSQILKEHPVENTQLQNEKLYLYYLQNGRDMYVDQELDINRLSDYDVDHIVPQSFLKDDSIDNKVLTRSDKNRGKSDNVPSEEVVKKMKNYWRQLLNAKLITQRKFDNLTKAERGGLSELDKAGFIKRQLVETRQITKHVAQILDSRMNTKYDENDKLIREVKVITLKSKLVSDFRKDFQFYKVREINNYHHAHDAYLNAVVGTALIKKYPKLESEFVYGDYKVYDVRKMITAHAEIMALRQGGLVMQNYRLIDATLYVTFEPCVMCAGAMIHSRIGRVVFGVRNAKTGAAGSLMDVLHYPGMNHRVEITEGILADECAALLCYFFRMPRQVFNAQKKAQSSTDGSSGSETPGTSESATPESSGSEVEFSHEYWMRHALTLAKRARDEREVPVGAVLVLNNRVIGEGWNRAIGLHDPAKSEQEIGKATAKYFFYSNIMNFFKTEITLANGEIRKRPLIETNGETGEIVWDKGRDFATVRKVLSMPQVNIVKKTEVQTGGFSKESILPKRNSDKLIARKKDWDPKKYGGFDSPTVAYSVLVVAKVEKGKSKKLKSVKELLGITIMERSSFEKNPIDFLEAKGYKEVKKDLIIKLPKYSLFELENGRKRMLASAGELQKGNELALPSKYVNFLYLASHYEKLKGSPEDNEQKQLFVEQHKHYLDEIIEQISEFSKRVILADANLDKVLSAYNKHRDKPIREQAENIIHLFTLTNLGAPAAFKYFDTTIDRKRYTSTKEVLDATLIHQSITGLYETRIDLSQLGGD

SEQ ID NO: 305 - protein, 1554 aa, synthetic construct
  REGION 1..1554: note = 129 TadA CP65ins 1029 polypeptide sequence
MDKKYSIGLAIGTNSVGWAVITDEYKVPSKKFKVLGNTDRHSIKKNLIGALLFDSGETAEATRLKRTARRRYTRRKNRICYLQEIFSNEMAKVDDSFFHRLEESFLVEEDKKHERHPIFGNIVDEVAYHEKYPTIYHLRKKLVDSTDKADLRLIYLALAHMIKFRGHFLIEGDLNPDNSDVDKLFIQLVQTYNQLFEENPINASGVDAKAILSARLSKSRRLENLIAQLPGEKKNGLFGNLIALSLGLTPNFKSNFDLAEDAKLQLSKDTYDDDLDNLLAQIGDQYADLFLAAKNLSDAILLSDILRVNTEITKAPLSASMIKRYDEHHQDLTLLKALVRQQLPEKYKEIFFDQSKNGYAGYIDGGASQEEFYKFIKPILEKMDGTEELLVKLNREDLLRKQRTFDNGSIPHQIHLGELHAILRRQEDFYPFLKDNREKIEKILTFRIPYYVGPLARGNSRFAWMTRKSEETITPWNFEEVVDKGASAQSFIERMTNFDKNLPNEKVLPKHSLLYEYFTVYNELTKVKYVTEGMRKPAFLSGEQKKAIVDLLFKTNRKVTVKQLKEDYFKKIECFDSVEISGVEDRFNASLGTYHDLLKIIKDKDFLDNEENEDILEDIVLTLTLFEDREMIEERLKTYAHLFDDKVMKQLKRRRYTGWGRLSRKLINGIRDKQSGKTILDFLKSDGFANRNFMQLIHDDSLTFKEDIQKAQVSGQGDSLHEHIANLAGSPAIKKGILQTVKVVDELVKVMGRHKPENIVIEMARENQTTQKGQKNSRERMKRIEEGIKELGSQILKEHPVENTQLQNEKLYLYYLQNGRDMYVDQELDINRLSDYDVDHIVPQSFLKDDSIDNKVLTRSDKNRGKSDNVPSEEVVKKMKNYWRQLLNAKLITQRKFDNLTKAERGGLSELDKAGFIKRQLVETRQITKHVAQILDSRMNTKYDENDKLIREVKVITLKSKLVSDFRKDFQFYKVREINNYHHAHDAYLNAVVGTALIKKYPKLESEFVYGDYKVYDVRKMIAKSEQEITAHAEIMALRQGGLVMQNYRLIDATLYVTFEPCVMCAGAMIHSRIGRVVFGVRNAKTGAAGSLMDVLHYPGMNHRVEITEGILADECAALLCYFFRMPRQVFNAQKKAQSSTDGSSGSETPGTSESATPESSGSEVEFSHEYWMRHALTLAKRARDEREVPVGAVLVLNNRVIGEGWNRAIGLHDPGKATAKYFFYSNIMNFFKTEITLANGEIRKRPLIETNGETGEIVWDKGRDFATVRKVLSMPQVNIVKKTEVQTGGFSKESILPKRNSDKLIARKKDWDPKKYGGFDSPTVAYSVLVVAKVEKGKSKKLKSVKELLGITIMERSSFEKNPIDFLEAKGYKEVKKDLIIKLPKYSLFELENGRKRMLASAGELQKGNELALPSKYVNFLYLASHYEKLKGSPEDNEQKQLFVEQHKHYLDEIIEQISEFSKRVILADANLDKVLSAYNKHRDKPIREQAENIIHLFTLTNLGAPAAFKYFDTTIDRKRYTSTKEVLDATLIHQSITGLYETRIDLSQLGGD

SEQ ID NO: 306 - protein, 1554 aa, synthetic construct
  REGION 1..1554: note = 130 TadA CP65ins 1041 polypeptide sequence
MDKKYSIGLAIGTNSVGWAVITDEYKVPSKKFKVLGNTDRHSIKKNLIGALLFDSGETAEATRLKRTARRRYTRRKNRICYLQEIFSNEMAKVDDSFFHRLEESFLVEEDKKHERHPIFGNIVDEVAYHEKYPTIYHLRKKLVDSTDKADLRLIYLALAHMIKFRGHFLIEGDLNPDNSDVDKLFIQLVQTYNQLFEENPINASGVDAKAILSARLSKSRRLENLIAQLPGEKKNGLFGNLIALSLGLTPNFKSNFDLAEDAKLQLSKDTYDDDLDNLLAQIGDQYADLFLAAKNLSDAILLSDILRVNTEITKAPLSASMIKRYDEHHQDLTLLKALVRQQLPEKYKEIFFDQSKNGYAGYIDGGASQEEFYKFIKPILEKMDGTEELLVKLNREDLLRKQRTFDNGSIPHQIHLGELHAILRRQEDFYPFLKDNREKIEKILTFRIPYYVGPLARGNSRFAWMTRKSEETITPWNFEEVVDKGASAQSFIERMTNFDKNLPNEKVLPKHSLLYEYFTVYNELTKVKYVTEGMRKPAFLSGEQKKAIVDLLFKTNRKVTVKQLKEDYFKKIECFDSVEISGVEDRFNASLGTYHDLLKIIKDKDFLDNEENEDILEDIVLTLTLFEDREMIEERLKTYAHLFDDKVMKQLKRRRYTGWGRLSRKLINGIRDKQSGKTILDFLKSDGFANRNFMQLIHDDSLTFKEDIQKAQVSGQGDSLHEHIANLAGSPAIKKGILQTVKVVDELVKVMGRHKPENIVIEMARENQTTQKGQKNSRERMKRIEEGIKELGSQILKEHPVENTQLQNEKLYLYYLQNGRDMYVDQELDINRLSDYDVDHIVPQSFLKDDSIDNKVLTRSDKNRGKSDNVPSEEVVKKMKNYWRQLLNAKLITQRKFDNLTKAERGGLSELDKAGFIKRQLVETRQITKHVAQILDSRMNTKYDENDKLIREVKVITLKSKLVSDFRKDFQFYKVREINNYHHAHDAYLNAVVGTALIKKYPKLESEFVYGDYKVYDVRKMIAKSEQEIGKATAKYFFYSTAHAEIMALRQGGLVMQNYRLIDATLYVTFEPCVMCAGAMIHSRIGRVVFGVRNAKTGAAGSLMDVLHYPGMNHRVEITEGILADECAALLCYFFRMPRQVFNAQKKAQSSTDGSSGSETPGTSESATPESSGSEVEFSHEYWMRHALTLAKRARDEREVPVGAVLVLNNRVIGEGWNRAIGLHDPNIMNFFKTEITLANGEIRKRPLIETNGETGEIVWDKGRDFATVRKVLSMPQVNIVKKTEVQTGGFSKESILPKRNSDKLIARKKDWDPKKYGGFDSPTVAYSVLVVAKVEKGKSKKLKSVKELLGITIMERSSFEKNPIDFLEAKGYKEVKKDLIIKLPKYSLFELENGRKRMLASAGELQKGNELALPSKYVNFLYLASHYEKLKGSPEDNEQKQLFVEQHKHYLDEIIEQISEFSKRVILADANLDKVLSAYNKHRDKPIREQAENIIHLFTLTNLGAPAAFKYFDTTIDRKRYTSTKEVLDATLIHQSITGLYETRIDLSQLGGD

SEQ ID NO: 307 - protein, 1554 aa, synthetic construct
  REGION 1..1554: note = 131 TadA CP65ins 1054 polypeptide sequence
MDKKYSIGLAIGTNSVGWAVITDEYKVPSKKFKVLGNTDRHSIKKNLIGALLFDSGETAEATRLKRTARRRYTRRKNRICYLQEIFSNEMAKVDDSFFHRLEESFLVEEDKKHERHPIFGNIVDEVAYHEKYPTIYHLRKKLVDSTDKADLRLIYLALAHMIKFRGHFLIEGDLNPDNSDVDKLFIQLVQTYNQLFEENPINASGVDAKAILSARLSKSRRLENLIAQLPGEKKNGLFGNLIALSLGLTPNFKSNFDLAEDAKLQLSKDTYDDDLDNLLAQIGDQYADLFLAAKNLSDAILLSDILRVNTEITKAPLSASMIKRYDEHHQDLTLLKALVRQQLPEKYKEIFFDQSKNGYAGYIDGGASQEEFYKFIKPILEKMDGTEELLVKLNREDLLRKQRTFDNGSIPHQIHLGELHAILRRQEDFYPFLKDNREKIEKILTFRIPYYVGPLARGNSRFAWMTRKSEETITPWNFEEVVDKGASAQSFIERMTNFDKNLPNEKVLPKHSLLYEYFTVYNELTKVKYVTEGMRKPAFLSGEQKKAIVDLLFKTNRKVTVKQLKEDYFKKIECFDSVEISGVEDRFNASLGTYHDLLKIIKDKDFLDNEENEDILEDIVLTLTLFEDREMIEERLKTYAHLFDDKVMKQLKRRRYTGWGRLSRKLINGIRDKQSGKTILDFLKSDGFANRNFMQLIHDDSLTFKEDIQKAQVSGQGDSLHEHIANLAGSPAIKKGILQTVKVVDELVKVMGRHKPENIVIEMARENQTTQKGQKNSRERMKRIEEGIKELGSQILKEHPVENTQLQNEKLYLYYLQNGRDMYVDQELDINRLSDYDVDHIVPQSFLKDDSIDNKVLTRSDKNRGKSDNVPSEEVVKKMKNYWRQLLNAKLITQRKFDNLTKAERGGLSELDKAGFIKRQLVETRQITKHVAQILDSRMNTKYDENDKLIREVKVITLKSKLVSDFRKDFQFYKVREINNYHHAHDAYLNAVVGTALIKKYPKLESEFVYGDYKVYDVRKMIAKSEQEIGKATAKYFFYSNIMNFFKTEITLANTAHAEIMALRQGGLVMQNYRLIDATLYVTFEPCVMCAGAMIHSRIGRVVFGVRNAKTGAAGSLMDVLHYPGMNHRVEITEGILADECAALLCYFFRMPRQVFNAQKKAQSSTDGSSGSETPGTSESATPESSGSEVEFSHEYWMRHALTLAKRARDEREVPVGAVLVLNNRVIGEGWNRAIGLHDPGEIRKRPLIETNGETGEIVWDKGRDFATVRKVLSMPQVNIVKKTEVQTGGFSKESILPKRNSDKLIARKKDWDPKKYGGFDSPTVAYSVLVVAKVEKGKSKKLKSVKELLGITIMERSSFEKNPIDFLEAKGYKEVKKDLIIKLPKYSLFELENGRKRMLASAGELQKGNELALPSKYVNFLYLASHYEKLKGSPEDNEQKQLFVEQHKHYLDEIIEQISEFSKRVILADANLDKVLSAYNKHRDKPIREQAENIIHLFTLTNLGAPAAFKYFDTTIDRKRYTSTKEVLDATLIHQSITGLYETRIDLSQLGGD

SEQ ID NO: 308 - protein, 1554 aa, synthetic construct
  REGION 1..1554: note = 132 TadA CP65ins 1246 polypeptide sequence
MDKKYSIGLAIGTNSVGWAVITDEYKVPSKKFKVLGNTDRHSIKKNLIGALLFDSGETAEATRLKRTARRRYTRRKNRICYLQEIFSNEMAKVDDSFFHRLEESFLVEEDKKHERHPIFGNIVDEVAYHEKYPTIYHLRKKLVDSTDKADLRLIYLALAHMIKFRGHFLIEGDLNPDNSDVDKLFIQLVQTYNQLFEENPINASGVDAKAILSARLSKSRRLENLIAQLPGEKKNGLFGNLIALSLGLTPNFKSNFDLAEDAKLQLSKDTYDDDLDNLLAQIGDQYADLFLAAKNLSDAILLSDILRVNTEITKAPLSASMIKRYDEHHQDLTLLKALVRQQLPEKYKEIFFDQSKNGYAGYIDGGASQEEFYKFIKPILEKMDGTEELLVKLNREDLLRKQRTFDNGSIPHQIHLGELHAILRRQEDFYPFLKDNREKIEKILTFRIPYYVGPLARGNSRFAWMTRKSEETITPWNFEEVVDKGASAQSFIERMTNFDKNLPNEKVLPKHSLLYEYFTVYNELTKVKYVTEGMRKPAFLSGEQKKAIVDLLFKTNRKVTVKQLKEDYFKKIECFDSVEISGVEDRFNASLGTYHDLLKIIKDKDFLDNEENEDILEDIVLTLTLFEDREMIEERLKTYAHLFDDKVMKQLKRRRYTGWGRLSRKLINGIRDKQSGKTILDFLKSDGFANRNFMQLIHDDSLTFKEDIQKAQVSGQGDSLHEHIANLAGSPAIKKGILQTVKVVDELVKVMGRHKPENIVIEMARENQTTQKGQKNSRERMKRIEEGIKELGSQILKEHPVENTQLQNEKLYLYYLQNGRDMYVDQELDINRLSDYDVDHIVPQSFLKDDSIDNKVLTRSDKNRGKSDNVPSEEVVKKMKNYWRQLLNAKLITQRKFDNLTKAERGGLSELDKAGFIKRQLVETRQITKHVAQILDSRMNTKYDENDKLIREVKVITLKSKLVSDFRKDFQFYKVREINNYHHAHDAYLNAVVGTALIKKYPKLESEFVYGDYKVYDVRKMIAKSEQEIGKATAKYFFYSNIMNFFKTEITLANGEIRKRPLIETNGETGEIVWDKGRDFATVRKVLSMPQVNIVKKTEVQTGGFSKESILPKRNSDKLIARKKDWDPKKYGGFDSPTVAYSVLVVAKVEKGKSKKLKSVKELLGITIMERSSFEKNPIDFLEAKGYKEVKKDLIIKLPKYSLFELENGRKRMLASAGELQKGNELALPSKYVNFLYLASHYEKLKGTAHAEIMALRQGGLVMQNYRLIDATLYVTFEPCVMCAGAMIHSRIGRVVFGVRNAKTGAAGSLMDVLHYPGMNHRVEITEGILADECAALLCYFFRMPRQVFNAQKKAQSSTDGSSGSETPGTSESATPESSGSEVEFSHEYWMRHALTLAKRARDEREVPVGAVLVLNNRVIGEGWNRAIGLHDPSPEDNEQKQLFVEQHKHYLDEIIEQISEFSKRVILADANLDKVLSAYNKHRDKPIREQAENIIHLFTLTNLGAPAAFKYFDTTIDRKRYTSTKEVLDATLIHQSITGLYETRIDLSQLGGD

SEQ ID NO: 309 - protein, 160 aa, Staphylococcus aureus
  REGION 1..160: note = MISC_FEATURE - TadA polypeptide sequence
MGSHMTNDIYFMTLAIEEAKKAAQLGEVPIGAIITKDDEVIARAHNLRETLQQPTAHAEHIAIERAAKVLGSWRLEGCTLYVTLEPCVMCAGTIVMSRIPRVVYGADDPKGGCSGSLMNLLQQSNFNHRAIVDKGVLKEACSTLLTTFFKNLRANKKSTN

SEQ ID NO: 310 - protein, 161 aa, Bacillus subtilis
  REGION 1..161: note = MISC_FEATURE - TadA polypeptide sequence
MTQDELYMKEAIKEAKKAEEKGEVPIGAVLVINGEIIARAHNLRETEQRSIAHAEMLVIDEACKALGTWRLEGATLYVTLEPCPMCAGAVVLSRVEKVVFGAFDPKGGCSGTLMNLLQEERFNHQAEVVSGVLEEECGGMLSAFFRELRKKKKAARKNLSE

SEQ ID NO: 311 - protein, 183 aa, Salmonella enterica
  REGION 1..183: note = MISC_FEATURE - TadA polypeptide sequence
  source 1..183: note = serovar Typhimurium
MPPAFITGVTSLSDVELDHEYWMRHALTLAKRAWDEREVPVGAVLVHNHRVIGEGWNRPIGRHDPTAHAEIMALRQGGLVLQNYRLLDTTLYVTLEPCVMCAGAMVHSRIGRVVFGARDAKTGAAGSLIDVLHHPGMNHRVEIIEGVLRDECATLLSDFFRMRRQEIKALKKADRAEGAGPAV

SEQ ID NO: 312 - protein, 164 aa, Shewanella putrefaciens
  REGION 1..164: note = MISC_FEATURE - TadA polypeptide sequence
MDEYWMQVAMQMAEKAEAAGEVPVGAVLVKDGQQIATGYNLSISQHDPTAHAEILCLRSAGKKLENYRLLDATLYITLEPCAMCAGAMVHSRIARVVYGARDEKTGAAGTVVNLLQHPAFNHQVEVTSGVLAEACSAQLSRFFKRRRDEKKALKLAQRAQQGIE

SEQ ID NO: 313 - protein, 173 aa, Haemophilus influenzae
  REGION 1..173: note = MISC_FEATURE - TadA polypeptide sequence
MDAAKVRSEFDEKMMRYALELADKAEALGEIPVGAVLVDDARNIIGEGWNLSIVQSDPTAHAEIIALRNGAKNIQNYRLLNSTLYVTLEPCTMCAGAILHSRIKRLVFGASDYKTGAIGSRFHFFDDYKMNHTLEITSGVLAEECSQKLSTFFQKRREEKKIEKALLKSLSDK

SEQ ID NO: 314 - protein, 161 aa, Caulobacter crescentus
  REGION 1..161: note = MISC_FEATURE - TadA polypeptide sequence
MRTDESEDQDHRMMRLALDAARAAAEAGETPVGAVILDPSTGEVIATAGNGPIAAHDPTAHAEIAAMRAAAAKLGNYRLTDLTLVVTLEPCAMCAGAISHARIGRVVFGADDPKGGAVVHGPKFFAQPTCHWRPEVTGGVLADESADLLRGFFRARRKAKI

SEQ ID NO: 315 - protein, 179 aa, Geobacter sulfurreducens
  REGION 1..179: note = MISC_FEATURE - TadA polypeptide sequence
MSSLKKTPIRDDAYWMGKAIREAAKAAARDEVPIGAVIVRDGAVIGRGHNLREGSNDPSAHAEMIAIRQAARRSANWRLTGATLYVTLEPCLMCMGAIILARLERVVFGCYDPKGGAAGSLYDLSADPRLNHQVRLSPGVCQEECGTMLSDFFRDLRRRKKAKATPALFIDERKVPPEP

SEQ ID NO: 316 - protein, 167 aa, synthetic construct
  REGION 1..167: note = TadA*8 polypeptide sequence
MSEVEFSHEYWMRHALTLAKRARDEREVPVGAVLVLNNRVIGEGWNRAIGLHDPTAHAEIMALRQGGLVMQNYRLIDATLYVTFEPCVMCAGAMIHSRIGRVVFGVRNAKTGAAGSLMDVLHYPGMNHRVEITEGILADECAALLCTFFRMPRQVFNAQKKAQSSTD

SEQ ID NO: 317 - RNA, 80 nt, synthetic construct
  misc_feature 1..80: note = gRNA scaffold polynucleotide sequence
  source 1..80: mol_type = other RNA
gttttagagctagaaatagcaagttaaaataaggctagtccgttatcaacttgaaaaagtggcaccgagtcggtgctttt

SEQ ID NO: 318 - RNA, 125 nt, synthetic construct
  misc_feature 1..125: note = gRNA scaffold polynucleotide sequence
  source 1..125: mol_type = other RNA
gtttttgtactctcaagatttaagtaactgtacaacgaaacttacacagttacttaaatcttgcagaagctacaaagataaggcttcatgccgaaatcaacaccctgtcattttatggcagggtg

SEQ ID NO: 319 - RNA, 76 nt, Streptococcus pyogenes
  misc_feature 1..76: note = S. pyogenes gRNA scaffold oligonucleotide sequence
  source 1..76: mol_type = other RNA
gttttagagctagaaatagcaagttaaaataaggctagtccgttatcaacttgaaaaagtggcaccgagtcggtgc

SEQ ID NO: 320 - RNA, 84 nt, Staphylococcus aureus
  misc_feature 1..84: note = S. aureus gRNA scaffold oligonucleotide sequence
  source 1..84: mol_type = other RNA
gttttagtactctgtaatgaaaattacagaatctactaaaacaaggcaaaatgccgtgtttatctcgtcaacttgttggcgaga

SEQ ID NO: 321 - RNA, 97 nt, Bacillus hisashii
  misc_feature 1..97: note = BhCas12b gRNA scaffold oligonucleotide sequence
  source 1..97: mol_type = other RNA
gttctgtcttttggtcaggacaaccgtctagctataagtgctgcagggtgtgagaaactcctattgctggacgatgtctcttacgaggcattagcac

SEQ ID NO: 322 - RNA, 88 nt, Bacillus sp.
  misc_feature 1..88: note = BvCas12b gRNA scaffold oligonucleotide sequence
  source 1..88: mol_type = other RNA
gacctatagggtcaatgaatctgtgcgtgtgccataagtaattaaaaattacccaccacaggagcacctgaaaacaggtgcttggcac

SEQ ID NO: 323 - RNA, 80 nt, synthetic construct
  misc_feature 1..80: note = gRNA scaffold nucleotide sequence; oligonucleotide sequence
  modified_base 78..80: mod_base = um
  misc_feature 78..80: note = In embodiments, a nucleotide(s) is linked to the preceding 5' nucleotide by a 3' phosphorothioate internucleotide linkage
  source 1..80: mol_type = other RNA
gttttagagctagaaatagcaagttaaaataaggctagtccgttatcaacttgaaaaagtgggaccgagtcggtgctttt

SEQ ID NO: 324 - RNA, 80 nt, synthetic construct; identical to SEQ ID NO: 317
  misc_feature 1..80: note = gRNA scaffold nucleotide sequence
  misc_feature 78..80: note = In embodiments, a nucleotide(s) is linked to the preceding 5' nucleotide by a 3' phosphorothioate internucleotide linkage
  modified_base 78..80: mod_base = um
  source 1..80: mol_type = other RNA

SEQ ID NO: 325 - RNA, 117 nt, Bacillus hisashii
  misc_feature 1..117: note = BhCas12b gRNA scaffold + guide sequence; oligonucleotide sequence
  misc_feature 1..97: note = BhCas12b sgRNA scaffold
  source 1..117: mol_type = other RNA
gttctgtcttttggtcaggacaaccgtctagctataagtgctgcagggtgtgagaaactcctattgctggacgatgtctcttacgaggcattagcacnnnnnnnnnnnnnnnnnnnn

SEQ ID NO: 326 - RNA, 108 nt, Bacillus sp.
  misc_feature 1..108: note = BvCas12b gRNA scaffold + guide sequence; oligonucleotide sequence
  misc_feature 1..88: note = BvCas12b gRNA scaffold
  source 1..108: mol_type = other RNA
gacctatagggtcaatgaatctgtgcgtgtgccataagtaattaaaaattacccaccacaggagcacctgaaaacaggtgcttggcacnnnnnnnnnnnnnnnnnnnn

SEQ ID NO: 327 - RNA, 119 nt, Alicyclobacillus acidiphilus
  misc_feature 1..119: note = AaCas12b gRNA scaffold + guide sequence; oligonucleotide sequence
  misc_feature 1..99: note = AaCas12b gRNA scaffold
  source 1..119: mol_type = other RNA
gtctaaaggacagaatttttcaacgggtgtgccaatggccactttccaggtggcaaagcccgttgaacttctcaaaaagaacgatctgagaagtggcacnnnnnnnnnnnnnnnnnnnn

SEQ ID NO: 328 - protein, 29 aa, synthetic construct
  REGION 1..29: note = synthetic polypeptide sequence
PKKKRKVEGADKRTADGSEFESPKKKRKV

SEQ ID NO: 329 - protein, 23 aa, synthetic construct
  REGION 1..23: note = synthetic peptide sequence
RKSGKIAAIVVKRPRKPKKKRKV

SEQ ID NO: 330 - protein, 8 aa, synthetic construct
  REGION 1..8: note = synthetic peptide sequence
SGGSSGGS

SEQ ID NO: 331 - protein, 1609 aa, synthetic construct
  REGION 1..1609: note = pNMG-B335ABE8.1_Y147T_CP5_NGC PAM_monomer polypeptide sequence
MSEVEFSHEYWMRHALTLAKRARDEREVPVGAVLVLNNRVIGEGWNRAIGLHDPTAHAEIMALRQGGLVMQNYRLIDATLYVTFEPCVMCAGAMIHSRIGRVVFGVRNAKTGAAGSLMDVLHYPGMNHRVEITEGILADECAALLCTFFRMPRQVFNAQKKAQSSTDSGGSSGGSSGSETPGTSESATPESSGGSSGGSEIGKATAKYFFYSNIMNFFKTEITLANGEIRKRPLIETNGETGEIVWDKGRDFATVRKVLSMPQVNIVKKTEVQTGGFSKESILPKRNSDKLIARKKDWDPKKYGGFMQPTVAYSVLVVAKVEKGKSKKLKSVKELLGITIMERSSFEKNPIDFLEAKGYKEVKKDLIIKLPKYSLFELENGRKRMLASAKFLQKGNELALPSKYVNFLYLASHYEKLKGSPEDNEQKQLFVEQHKHYLDEIIEQISEFSKRVILADANLDKVLSAYNKHRDKPIREQAENIIHLFTLTNLGAPRAFKYFDTTIARKEYRSTKEVLDATLIHQSITGLYETRIDLSQLGGDGGSGGSGGSGGSGGSGGSGGMDKKYSIGLAIGTNSVGWAVITDEYKVPSKKFKVLGNTDRHSIKKNLIGALLFDSGETAEATRLKRTARRRYTRRKNRICYLQEIFSNEMAKVDDSFFHRLEESFLVEEDKKHERHPIFGNIVDEVAYHEKYPTIYHLRKKLVDSTDKADLRLIYLALAHMIKFRGHFLIEGDLNPDNSDVDKLFIQLVQTYNQLFEENPINASGVDAKAILSARLSKSRRLENLIAQLPGEKKNGLFGNLIALSLGLTPNFKSNFDLAEDAKLQLSKDTYDDDLDNLLAQIGDQYADLFLAAKNLSDAILLSDILRVNTEITKAPLSASMIKRYDEHHQDLTLLKALVRQQLPEKYKEIFFDQSKNGYAGYIDGGASQEEFYKFIKPILEKMDGTEELLVKLNREDLLRKQRTFDNGSIPHQIHLGELHAILRRQEDFYPFLKDNREKIEKILTFRIPYYVGPLARGNSRFAWMTRKSEETITPWNFEEVVDKGASAQSFIERMTNFDKNLPNEKVLPKHSLLYEYFTVYNELTKVKYVTEGMRKPAFLSGEQKKAIVDLLFKTNRKVTVKQLKEDYFKKIECFDSVEISGVEDRFNASLGTYHDLLKIIKDKDFLDNEENEDILEDIVLTLTLFEDREMIEERLKTYAHLFDDKVMKQLKRRRYTGWGRLSRKLINGIRDKQSGKTILDFLKSDGFANRNFMQLIHDDSLTFKEDIQKAQVSGQGDSLHEHIANLAGSPAIKKGILQTVKVVDELVKVMGRHKPENIVIEMARENQTTQKGQKNSRERMKRIEEGIKELGSQILKEHPVENTQLQNEKLYLYYLQNGRDMYVDQELDINRLSDYDVDHIVPQSFLKDDSIDNKVLTRSDKNRGKSDNVPSEEVVKKMKNYWRQLLNAKLITQRKFDNLTKAERGGLSELDKAGFIKRQLVETRQITKHVAQILDSRMNTKYDENDKLIREVKVITLKSKLVSDFRKDFQFYKVREINNYHHAHDAYLNAVVGTALIKKYPKLESEFVYGDYKVYDVRKMIAKSEQEGADKRTADGSEFESPKKKRKV

SEQ ID NO: 332 - protein, 1807 aa, synthetic construct
  REGION 1..1807: note = pNMG-357_ABE8.14 with NGC PAMCP5 polypeptide sequence
  REGION 1..174: note = MISC_FEATURE - Adenosine deaminase sequence
  REGION 175..198: note = MISC_FEATURE - Linker sequence
  REGION 199..365: note = MISC_FEATURE - Adenosine deaminase sequence
  REGION 366..397: note = MISC_FEATURE - Linker sequence
  REGION 398..738: note = MISC_FEATURE - Sequence derived from Cas9
  REGION 739..759: note = MISC_FEATURE - Linker sequence
  REGION 760..1785: note = MISC_FEATURE - Sequence derived from Cas9
  REGION 1786..1807: note = MISC_FEATURE - Bipartite nuclear localization sequence
MSEVEFSHEYWMRHALTLAKRAWDEREVPVGAVLVHNNRVIGEGWNRPIGRHDPTAHAEIMALRQGGLVMQNYRLIDATLYVTLEPCVMCAGAMIHSRIGRVVFGARDAKTGAAGSLMDVLHHPGMNHRVEITEGILADECAALLSDFFRMRRQEIKAQKKAQSSTDGGSSGGSSGSETPGTSESATPESSGGSSGGSMSEVEFSHEYWMRHALTLAKRARDEREVPVGAVLVLNNRVIGEGWNRAIGLHDPTAHAEIMALRQGGLVMQNYRLIDATLYVTFEPCVMCAGAMIHSRIGRVVFGVRNAKTGAAGSLMDVLHYPGMNHRVEITEGILADECAALLCTFFRMPRQVFNAQKKAQSSTDSGGSSGGSSGSETPGTSESATPESSGGSSGGSEIGKATAKYFFYSNIMNFFKTEITLANGEIRKRPLIETNGETGEIVWDKGRDFATVRKVLSMPQVNIVKKTEVQTGGFSKESILPKRNSDKLIARKKDWDPKKYGGFMQPTVAYSVLVVAKVEKGKSKKLKSVKELLGITIMERSSFEKNPIDFLEAKGYKEVKKDLIIKLPKYSLFELENGRKRMLASAKFLQKGNELALPSKYVNFLYLASHYEKLKGSPEDNEQKQLFVEQHKHYLDEIIEQISEFSKRVILADANLDKVLSAYNKHRDKPIREQAENIIHLFTLTNLGAPRAFKYFDTTIARKEYRSTKEVLDATLIHQSITGLYETRIDLSQLGGDGGSGGSGGSGGSGGSGGSGGMDKKYSIGLAIGTNSVGWAVITDEYKVPSKKFKVLGNTDRHSIKKNLIGALLFDSGETAEATRLKRTARRRYTRRKNRICYLQEIFSNEMAKVDDSFFHRLEESFLVEEDKKHERHPIFGNIVDEVAYHEKYPTIYHLRKKLVDSTDKADLRLIYLALAHMIKFRGHFLIEGDLNPDNSDVDKLFIQLVQTYNQLFEENPINASGVDAKAILSARLSKSRRLENLIAQLPGEKKNGLFGNLIALSLGLTPNFKSNFDLAEDAKLQLSKDTYDDDLDNLLAQIGDQYADLFLAAKNLSDAILLSDILRVNTEITKAPLSASMIKRYDEHHQDLTLLKALVRQQLPEKYKEIFFDQSKNGYAGYIDGGASQEEFYKFIKPILEKMDGTEELLVKLNREDLLRKQRTFDNGSIPHQIHLGELHAILRRQEDFYPFLKDNREKIEKILTFRIPYYVGPLARGNSRFAWMTRKSEETITPWNFEEVVDKGASAQSFIERMTNFDKNLPNEKVLPKHSLLYEYFTVYNELTKVKYVTEGMRKPAFLSGEQKKAIVDLLFKTNRKVTVKQLKEDYFKKIECFDSVEISGVEDRFNASLGTYHDLLKIIKDKDFLDNEENEDILEDIVLTLTLFEDREMIEERLKTYAHLFDDKVMKQLKRRRYTGWGRLSRKLINGIRDKQSGKTILDFLKSDGFANRNFMQLIHDDSLTFKEDIQKAQVSGQGDSLHEHIANLAGSPAIKKGILQTVKVVDELVKVMGRHKPENIVIEMARENQTTQKGQKNSRERMKRIEEGIKELGSQILKEHPVENTQLQNEKLYLYYLQNGRDMYVDQELDINRLSDYDVDHIVPQSFLKDDSIDNKVLTRSDKNRGKSDNVPSEEVVKKMKNYWRQLLNAKLITQRKFDNLTKAERGGLSELDKAGFIKRQLVETRQITKHVAQILDSRMNTKYDENDKLIREVKVITLKSKLVSDFRKDFQFYKVREINNYHHAHDAYLNAVVGTALIKKYPKLESEFVYGDYKVYDVRKMIAKSEQEGADKRTADGSEFESPKKKRKV

SEQ ID NO: 333 - protein, 1588 aa, synthetic construct
  REGION 1..1588: note = ABE8.8-m polypeptide sequence
  REGION 1..167: note = MISC_FEATURE - Adenosine deaminase sequence
  REGION 168..199: note = MISC_FEATURE - Linker sequence
  REGION 200..1566: note = MISC_FEATURE - Sequence derived from Cas9
  REGION 1567..1588: note = MISC_FEATURE - Bipartite nuclear localization sequence
MSEVEFSHEYWMRHALTLAKRARDEREVPVGAVLVLNNRVIGEGWNRAIGLHDPTAHAEIMALRQGGLVMQNYRLIDATLYVTFEPCVMCAGAMIHSRIGRVVFGVRNAKTGAAGSLMDVLHHPGMNHRVEITEGILADECAALLCRFFRMPRRVFNAQKKAQSSTDSGGSSGGSSGSETPGTSESATPESSGGSSGGSDKKYSIGLAIGTNSVGWAVITDEYKVPSKKFKVLGNTDRHSIKKNLIGALLFDSGETAEATRLKRTARRRYTRRKNRICYLQEIFSNEMAKVDDSFFHRLEESFLVEEDKKHERHPIFGNIVDEVAYHEKYPTIYHLRKKLVDSTDKADLRLIYLALAHMIKFRGHFLIEGDLNPDNSDVDKLFIQLVQTYNQLFEENPINASGVDAKAILSARLSKSRRLENLIAQLPGEKKNGLFGNLIALSLGLTPNFKSNFDLAEDAKLQLSKDTYDDDLDNLLAQIGDQYADLFLAAKNLSDAILLSDILRVNTEITKAPLSASMIKRYDEHHQDLTLLKALVRQQLPEKYKEIFFDQSKNGYAGYIDGGASQEEFYKFIKPILEKMDGTEELLVKLNREDLLRKQRTFDNGSIPHQIHLGELHAILRRQEDFYPFLKDNREKIEKILTFRIPYYVGPLARGNSRFAWMTRKSEETITPWNFEEVVDKGASAQSFIERMTNFDKNLPNEKVLPKHSLLYEYFTVYNELTKVKYVTEGMRKPAFLSGEQKKAIVDLLFKTNRKVTVKQLKEDYFKKIECFDSVEISGVEDRFNASLGTYHDLLKIIKDKDFLDNEENEDILEDIVLTLTLFEDREMIEERLKTYAHLFDDKVMKQLKRRRYTGWGRLSRKLINGIRDKQSGKTILDFLKSDGFANRNFMQLIHDDSLTFKEDIQKAQVSGQGDSLHEHIANLAGSPAIKKGILQTVKVVDELVKVMGRHKPENIVIEMARENQTTQKGQKNSRERMKRIEEGIKELGSQILKEHPVENTQLQNEKLYLYYLQNGRDMYVDQELDINRLSDYDVDHIVPQSFLKDDSIDNKVLTRSDKNRGKSDNVPSEEVVKKMKNYWRQLLNAKLITQRKFDNLTKAERGGLSELDKAGFIKRQLVETRQITKHVAQILDSRMNTKYDENDKLIREVKVITLKSKLVSDFRKDFQFYKVREINNYHHAHDAYLNAVVGTALIKKYPKLESEFVYGDYKVYDVRKMIAKSEQEIGKATAKYFFYSNIMNFFKTEITLANGEIRKRPLIETNGETGEIVWDKGRDFATVRKVLSMPQVNIVKKTEVQTGGFSKESILPKRNSDKLIARKKDWDPKKYGGFDSPTVAYSVLVVAKVEKGKSKKLKSVKELLGITIMERSSFEKNPIDFLEAKGYKEVKKDLIIKLPKYSLFELENGRKRMLASAGELQKGNELALPSKYVNFLYLASHYEKLKGSPEDNEQKQLFVEQHKHYLDEIIEQISEFSKRVILADANLDKVLSAYNKHRDKPIREQAENIIHLFTLTNLGAPAAFKYFDTTIDRKRYTSTKEVLDATLIHQSITGLYETRIDLSQLGGDEGADKRTADGSEFESPKKKRKV

SEQ ID NO: 334 - protein, 1786 aa, synthetic construct
  REGION 1..1786: note = ABE8.8-d polypeptide sequence
  REGION 1..167: note = MISC_FEATURE - Adenosine deaminase sequence
  REGION 168..199: note = MISC_FEATURE - Linker sequence
  REGION 200..365: note = MISC_FEATURE - Adenosine deaminase sequence
  REGION 366..397: note = MISC_FEATURE - Linker sequence
  REGION 398..1764: note = MISC_FEATURE - Sequence derived from Cas9
  REGION 1765..1786: note = MISC_FEATURE - Bipartite nuclear localization sequence
MSEVEFSHEYWMRHALTLAKRAWDEREVPVGAVLVHNNRVIGEGWNRPIGRHDPTAHAEIMALRQGGLVMQNYRLIDATLYVTLEPCVMCAGAMIHSRIGRVVFGARDAKTGAAGSLMDVLHHPGMNHRVEITEGILADECAALLSDFFRMRRQEIKAQKKAQSSTDSGGSSGGSSGSETPGTSESATPESSGGSSGGSSEVEFSHEYWMRHALTLAKRARDEREVPVGAVLVLNNRVIGEGWNRAIGLHDPTAHAEIMALRQGGLVMQNYRLIDATLYVTFEPCVMCAGAMIHSRIGRVVFGVRNAKTGAAGSLMDVLHHPGMNHRVEITEGILADECAALLCRFFRMPRRVFNAQKKAQSSTDSGGSSGGSSGSETPGTSESATPESSGGSSGGSDKKYSIGLAIGTNSVGWAVITDEYKVPSKKFKVLGNTDRHSIKKNLIGALLFDSGETAEATRLKRTARRRYTRRKNRICYLQEIFSNEMAKVDDSFFHRLEESFLVEEDKKHERHPIFGNIVDEVAYHEKYPTIYHLRKKLVDSTDKADLRLIYLALAHMIKFRGHFLIEGDLNPDNSDVDKLFIQLVQTYNQLFEENPINASGVDAKAILSARLSKSRRLENLIAQLPGEKKNGLFGNLIALSLGLTPNFKSNFDLAEDAKLQLSKDTYDDDLDNLLAQIGDQYADLFLAAKNLSDAILLSDILRVNTEITKAPLSASMIKRYDEHHQDLTLLKALVRQQLPEKYKEIFFDQSKNGYAGYIDGGASQEEFYKFIKPILEKMDGTEELLVKLNREDLLRKQRTFDNGSIPHQIHLGELHAILRRQEDFYPFLKDNREKIEKILTFRIPYYVGPLARGNSRFAWMTRKSEETITPWNFEEVVDKGASAQSFIERMTNFDKNLPNEKVLPKHSLLYEYFTVYNELTKVKYVTEGMRKPAFLSGEQKKAIVDLLFKTNRKVTVKQLKEDYFKKIECFDSVEISGVEDRFNASLGTYHDLLKIIKDKDFLDNEENEDILEDIVLTLTLFEDREMIEERLKTYAHLFDDKVMKQLKRRRYTGWGRLSRKLINGIRDKQSGKTILDFLKSDGFANRNFMQLIHDDSLTFKEDIQKAQVSGQGDSLHEHIANLAGSPAIKKGILQTVKVVDELVKVMGRHKPENIVIEMARENQTTQKGQKNSRERMKRIEEGIKELGSQILKEHPVENTQLQNEKLYLYYLQNGRDMYVDQELDINRLSDYDVDHIVPQSFLKDDSIDNKVLTRSDKNRGKSDNVPSEEVVKKMKNYWRQLLNAKLITQRKFDNLTKAERGGLSELDKAGFIKRQLVETRQITKHVAQILDSRMNTKYDENDKLIREVKVITLKSKLVSDFRKDFQFYKVREINNYHHAHDAYLNAVVGTALIKKYPKLESEFVYGDYKVYDVRKMIAKSEQEIGKATAKYFFYSNIMNFFKTEITLANGEIRKRPLIETNGETGEIVWDKGRDFATVRKVLSMPQVNIVKKTEVQTGGFSKESILPKRNSDKLIARKKDWDPKKYGGFDSPTVAYSVLVVAKVEKGKSKKLKSVKELLGITIMERSSFEKNPIDFLEAKGYKEVKKDLIIKLPKYSLFELENGRKRMLASAGELQKGNELALPSKYVNFLYLASHYEKLKGSPEDNEQKQLFVEQHKHYLDEIIEQISEFSKRVILADANLDKVLSAYNKHRDKPIREQAENIIHLFTLTNLGAPAAFKYFDTTIDRKRYTSTKEVLDATLIHQSITGLYETRIDLSQLGGDEGADKRTADGSEFESPKKKRKV

SEQ ID NO: 335 - protein, 1588 aa, synthetic construct
  REGION 1..1588: note = ABE8.13-m polypeptide sequence
  REGION 1..167: note = MISC_FEATURE - Adenosine deaminase sequence
  REGION 168..199: note = MISC_FEATURE - Linker sequence
  REGION 200..1566: note = MISC_FEATURE - Sequence derived from Cas9
  REGION 1567..1588: note = MISC_FEATURE - Bipartite nuclear localization sequence
MSEVEFSHEYWMRHALTLAKRARDEREVPVGAVLVLNNRVIGEGWNRAIGLHDPTAHAEIMALRQGGLVMQNYRLYDATLYVTFEPCVMCAGAMIHSRIGRVVFGVRNAKTGAAGSLMDVLHHPGMNHRVEITEGILADECAALLCRFFRMPRRVFNAQKKAQSSTDSGGSSGGSSGSETPGTSESATPESSGGSSGGSDKKYSIGLAIGTNSVGWAVITDEYKVPSKKFKVLGNTDRHSIKKNLIGALLFDSGETAEATRLKRTARRRYTRRKNRICYLQEIFSNEMAKVDDSFFHRLEESFLVEEDKKHERHPIFGNIVDEVAYHEKYPTIYHLRKKLVDSTDKADLRLIYLALAHMIKFRGHFLIEGDLNPDNSDVDKLFIQLVQTYNQLFEENPINASGVDAKAILSARLSKSRRLENLIAQLPGEKKNGLFGNLIALSLGLTPNFKSNFDLAEDAKLQLSKDTYDDDLDNLLAQIGDQYADLFLAAKNLSDAILLSDILRVNTEITKAPLSASMIKRYDEHHQDLTLLKALVRQQLPEKYKEIFFDQSKNGYAGYIDGGASQEEFYKFIKPILEKMDGTEELLVKLNREDLLRKQRTFDNGSIPHQIHLGELHAILRRQEDFYPFLKDNREKIEKILTFRIPYYVGPLARGNSRFAWMTRKSEETITPWNFEEVVDKGASAQSFIERMTNFDKNLPNEKVLPKHSLLYEYFTVYNELTKVKYVTEGMRKPAFLSGEQKKAIVDLLFKTNRKVTVKQLKEDYFKKIECFDSVEISGVEDRFNASLGTYHDLLKIIKDKDFLDNEENEDILEDIVLTLTLFEDREMIEERLKTYAHLFDDKVMKQLKRRRYTGWGRLSRKLINGIRDKQSGKTILDFLKSDGFANRNFMQLIHDDSLTFKEDIQKAQVSGQGDSLHEHIANLAGSPAIKKGILQTVKVVDELVKVMGRHKPENIVIEMARENQTTQKGQKNSRERMKRIEEGIKELGSQILKEHPVENTQLQNEKLYLYYLQNGRDMYVDQELDINRLSDYDVDHIVPQSFLKDDSIDNKVLTRSDKNRGKSDNVPSEEVVKKMKNYWRQLLNAKLITQRKFDNLTKAERGGLSELDKAGFIKRQLVETRQITKHVAQILDSRMNTKYDENDKLIREVKVITLKSKLVSDFRKDFQFYKVREINNYHHAHDAYLNAVVGTALIKKYPKLESEFVYGDYKVYDVRKMIAKSEQEIGKATAKYFFYSNIMNFFKTEITLANGEIRKRPLIETNGETGEIVWDKGRDFATVRKVLSMPQVNIVKKTEVQTGGFSKESILPKRNSDKLIARKKDWDPKKYGGFDSPTVAYSVLVVAKVEKGKSKKLKSVKELLGITIMERSSFEKNPIDFLEAKGYKEVKKDLIIKLPKYSLFELENGRKRMLASAGELQKGNELALPSKYVNFLYLASHYEKLKGSPEDNEQKQLFVEQHKHYLDEIIEQISEFSKRVILADANLDKVLSAYNKHRDKPIREQAENIIHLFTLTNLGAPAAFKYFDTTIDRKRYTSTKEVLDATLIHQSITGLYETRIDLSQLGGDEGADKRTADGSEFESPKKKRKV

SEQ ID NO: 336 - protein, 1786 aa, synthetic construct
  REGION 1..1786: note = ABE8.13-d polypeptide sequence
  REGION 1..167: note = MISC_FEATURE - Adenosine deaminase sequence
  REGION 168..199: note = MISC_FEATURE - Linker sequence
  REGION 200..365: note = MISC_FEATURE - Adenosine deaminase sequence
  REGION 366..397: note = MISC_FEATURE - Linker sequence
  REGION 398..1764: note = MISC_FEATURE - Sequence derived from Cas9
  REGION 1765..1786: note = MISC_FEATURE - Bipartite nuclear localization sequence
MSEVEFSHEYWMRHALTLAKRAWDEREVPVGAVLVHNNRVIGEGWNRPIGRHDPTAHAEIMALRQGGLVMQNYRLIDATLYVTLEPCVMCAGAMIHSRIGRVVFGARDAKTGAAGSLMDVLHHPGMNHRVEITEGILADECAALLSDFFRMRRQEIKAQKKAQSSTDSGGSSGGSSGSETPGTSESATPESSGGSSGGSSEVEFSHEYWMRHALTLAKRARDEREVPVGAVLVLNNRVIGEGWNRAIGLHDPTAHAEIMALRQGGLVMQNYRLYDATLYVTFEPCVMCAGAMIHSRIGRVVFGVRNAKTGAAGSLMDVLHHPGMNHRVEITEGILADECAALLCRFFRMPRRVFNAQKKAQSSTDSGGSSGGSSGSETPGTSESATPESSGGSSGGSDKKYSIGLAIGTNSVGWAVITDEYKVPSKKFKVLGNTDRHSIKKNLIGALLFDSGETAEATRLKRTARRRYTRRKNRICYLQEIFSNEMAKVDDSFFHRLEESFLVEEDKKHERHPIFGNIVDEVAYHEKYPTIYHLRKKLVDSTDKADLRLIYLALAHMIKFRGHFLIEGDLNPDNSDVDKLFIQLVQTYNQLFEENPINASGVDAKAILSARLSKSRRLENLIAQLPGEKKNGLFGNLIALSLGLTPNFKSNFDLAEDAKLQLSKDTYDDDLDNLLAQIGDQYADLFLAAKNLSDAILLSDILRVNTEITKAPLSASMIKRYDEHHQDLTLLKALVRQQLPEKYKEIFFDQSKNGYAGYIDGGASQEEFYKFIKPILEKMDGTEELLVKLNREDLLRKQRTFDNGSIPHQIHLGELHAILRRQEDFYPFLKDNREKIEKILTFRIPYYVGPLARGNSRFAWMTRKSEETITPWNFEEVVDKGASAQSFIERMTNFDKNLPNEKVLPKHSLLYEYFTVYNELTKVKYVTEGMRKPAFLSGEQKKAIVDLLFKTNRKVTVKQLKEDYFKKIECFDSVEISGVEDRFNASLGTYHDLLKIIKDKDFLDNEENEDILEDIVLTLTLFEDREMIEERLKTYAHLFDDKVMKQLKRRRYTGWGRLSRKLINGIRDKQSGKTILDFLKSDGFANRNFMQLIHDDSLTFKEDIQKAQVSGQGDSLHEHIANLAGSPAIKKGILQTVKVVDELVKVMGRHKPENIVIEMARENQTTQKGQKNSRERMKRIEEGIKELGSQILKEHPVENTQLQNEKLYLYYLQNGRDMYVDQELDINRLSDYDVDHIVPQSFLKDDSIDNKVLTRSDKNRGKSDNVPSEEVVKKMKNYWRQLLNAKLITQRKFDNLTKAERGGLSELDKAGFIKRQLVETRQITKHVAQILDSRMNTKYDENDKLIREVKVITLKSKLVSDFRKDFQFYKVREINNYHHAHDAYLNAVVGTALIKKYPKLESEFVYGDYKVYDVRKMIAKSEQEIGKATAKYFFYSNIMNFFKTEITLANGEIRKRPLIETNGETGEIVWDKGRDFATVRKVLSMPQVNIVKKTEVQTGGFSKESILPKRNSDKLIARKKDWDPKKYGGFDSPTVAYSVLVVAKVEKGKSKKLKSVKELLGITIMERSSFEKNPIDFLEAKGYKEVKKDLIIKLPKYSLFELENGRKRMLASAGELQKGNELALPSKYVNFLYLASHYEKLKGSPEDNEQKQLFVEQHKHYLDEIIEQISEFSKRVILADANLDKVLSAYNKHRDKPIREQAENIIHLFTLTNLGAPAAFKYFDTTIDRKRYTSTKEVLDATLIHQSITGLYETRIDLSQLGGDEGADKRTADGSEFESPKKKRKV

SEQ ID NO: 337 - protein, 1588 aa, synthetic construct
  REGION 1..1588: note = ABE8.17-m polypeptide sequence
  REGION 1..167: note = MISC_FEATURE - Adenosine deaminase sequence
  REGION 168..199: note = MISC_FEATURE - Linker sequence
  REGION 200..1566: note = MISC_FEATURE - Sequence derived from Cas9
  REGION 1567..1588: note = MISC_FEATURE - Bipartite nuclear localization sequence
MSEVEFSHEYWMRHALTLAKRARDEREVPVGAVLVLNNRVIGEGWNRAIGLHDPTAHAEIMALRQGGLVMQNYRLIDATLYSTFEPCVMCAGAMIHSRIGRVVFGVRNAKTGAAGSLMDVLHYPGMNHRVEITEGILADECAALLCYFFRMPRRVFNAQKKAQSSTDSGGSSGGSSGSETPGTSESATPESSGGSSGGSDKKYSIGLAIGTNSVGWAVITDEYKVPSKKFKVLGNTDRHSIKKNLIGALLFDSGETAEATRLKRTARRRYTRRKNRICYLQEIFSNEMAKVDDSFFHRLEESFLVEEDKKHERHPIFGNIVDEVAYHEKYPTIYHLRKKLVDSTDKADLRLIYLALAHMIKFRGHFLIEGDLNPDNSDVDKLFIQLVQTYNQLFEENPINASGVDAKAILSARLSKSRRLENLIAQLPGEKKNGLFGNLIALSLGLTPNFKSNFDLAEDAKLQLSKDTYDDDLDNLLAQIGDQYADLFLAAKNLSDAILLSDILRVNTEITKAPLSASMIKRYDEHHQDLTLLKALVRQQLPEKYKEIFFDQSKNGYAGYIDGGASQEEFYKFIKPILEKMDGTEELLVKLNREDLLRKQRTFDNGSIPHQIHLGELHAILRRQEDFYPFLKDNREKIEKILTFRIPYYVGPLARGNSRFAWMTRKSEETITPWNFEEVVDKGASAQSFIERMTNFDKNLPNEKVLPKHSLLYEYFTVYNELTKVKYVTEGMRKPAFLSGEQKKAIVDLLFKTNRKVTVKQLKEDYFKKIECFDSVEISGVEDRFNASLGTYHDLLKIIKDKDFLDNEENEDILEDIVLTLTLFEDREMIEERLKTYAHLFDDKVMKQLKRRRYTGWGRLSRKLINGIRDKQSGKTILDFLKSDGFANRNFMQLIHDDSLTFKEDIQKAQVSGQGDSLHEHIANLAGSPAIKKGILQTVKVVDELVKVMGRHKPENIVIEMARENQTTQKGQKNSRERMKRIEEGIKELGSQILKEHPVENTQLQNEKLYLYYLQNGRDMYVDQELDINRLSDYDVDHIVPQSFLKDDSIDNKVLTRSDKNRGKSDNVPSEEVVKKMKNYWRQLLNAKLITQRKFDNLTKAERGGLSELDKAGFIKRQLVETRQITKHVAQILDSRMNTKYDENDKLIREVKVITLKSKLVSDFRKDFQFYKVREINNYHHAHDAYLNAVVGTALIKKYPKLESEFVYGDYKVYDVRKMIAKSEQEIGKATAKYFFYSNIMNFFKTEITLANGEIRKRPLIETNGETGEIVWDKGRDFATVRKVLSMPQVNIVKKTEVQTGGFSKESILPKRNSDKLIARKKDWDPKKYGGFDSPTVAYSVLVVAKVEKGKSKKLKSVKELLGITIMERSSFEKNPIDFLEAKGYKEVKKDLIIKLPKYSLFELENGRKRMLASAGELQKGNELALPSKYVNFLYLASHYEKLKGSPEDNEQKQLFVEQHKHYLDEIIEQISEFSKRVILADANLDKVLSAYNKHRDKPIREQAENIIHLFTLTNLGAPAAFKYFDTTIDRKRYTSTKEVLDATLIHQSITGLYETRIDLSQLGGDEGADKRTADGSEFESPKKKRKV

SEQ ID NO: 338 - protein, 1786 aa, synthetic construct
  REGION 1..1786: note = ABE8.17-d polypeptide sequence
  REGION 1..167: note = MISC_FEATURE - Adenosine deaminase sequence
  REGION 168..199: note = MISC_FEATURE - Linker sequence
  REGION 200..365: note = MISC_FEATURE - Adenosine deaminase sequence
  REGION 366..397: note = MISC_FEATURE - Linker sequence
  REGION 398..1764: note = MISC_FEATURE - Sequence derived from Cas9
  REGION 1765..1786: note = MISC_FEATURE - Bipartite nuclear localization sequence
MSEVEFSHEYWMRHALTLAKRAWDEREVPVGAVLVHNNRVIGEGWNRPIGRHDPTAHAEIMALRQGGLVMQNYRLIDATLYVTLEPCVMCAGAMIHSRIGRVVFGARDAKTGAAGSLMDVLHHPGMNHRVEITEGILADECAALLSDFFRMRRQEIKAQKKAQSSTDSGGSSGGSSGSETPGTSESATPESSGGSSGGSSEVEFSHEYWMRHALTLAKRARDEREVPVGAVLVLNNRVIGEGWNRAIGLHDPTAHAEIMALRQGGLVMQNYRLIDATLYSTFEPCVMCAGAMIHSRIGRVVFGVRNAKTGAAGSLMDVLHYPGMNHRVEITEGILADECAALLCYFFRMPRRVFNAQKKAQSSTDSGGSSGGSSGSETPGTSESATPESSGGSSGGSDKKYSIGLAIGTNSVGWAVITDEYKVPSKKFKVLGNTDRHSIKKNLIGALLFDSGETAEATRLKRTARRRYTRRKNRICYLQEIFSNEMAKVDDSFFHRLEESFLVEEDKKHERHPIFGNIVDEVAYHEKYPTIYHLRKKLVDSTDKADLRLIYLALAHMIKFRGHFLIEGDLNPDNSDVDKLFIQLVQTYNQLFEENPINASGVDAKAILSARLSKSRRLENLIAQLPGEKKNGLFGNLIALSLGLTPNFKSNFDLAEDAKLQLSKDTYDDDLDNLLAQIGDQYADLFLAAKNLSDAILLSDILRVNTEITKAPLSASMIKRYDEHHQDLTLLKALVRQQLPEKYKEIFFDQSKNGYAGYIDGGASQEEFYKFIKPILEKMDGTEELLVKLNREDLLRKQRTFDNGSIPHQIHLGELHAILRRQEDFYPFLKDNREKIEKILTFRIPYYVGPLARGNSRFAWMTRKSEETITPWNFEEVVDKGASAQSFIERMTNFDKNLPNEKVLPKHSLLYEYFTVYNELTKVKYVTEGMRKPAFLSGEQKKAIVDLLFKTNRKVTVKQLKEDYFKKIECFDSVEISGVEDRFNASLGTYHDLLKIIKDKDFLDNEENEDILEDIVLTLTLFEDREMIEERLKTYAHLFDDKVMKQLKRRRYTGWGRLSRKLINGIRDKQSGKTILDFLKSDGFANRNFMQLIHDDSLTFKEDIQKAQVSGQGDSLHEHIANLAGSPAIKKGILQTVKVVDELVKVMGRHKPENIVIEMARENQTTQKGQKNSRERMKRIEEGIKELGSQILKEHPVENTQLQNEKLYLYYLQNGRDMYVDQELDINRLSDYDVDHIVPQSFLKDDSIDNKVLTRSDKNRGKSDNVPSEEVVKKMKNYWRQLLNAKLITQRKFDNLTKAERGGLSELDKAGFIKRQLVETRQITKHVAQILDSRMNTKYDENDKLIREVKVITLKSKLVSDFRKDFQFYKVREINNYHHAHDAYLNAVVGTALIKKYPKLESEFVYGDYKVYDVRKMIAKSEQEIGKATAKYFFYSNIMNFFKTEITLANGEIRKRPLIETNGETGEIVWDKGRDFATVRKVLSMPQVNIVKKTEVQTGGFSKESILPKRNSDKLIARKKDWDPKKYGGFDSPTVAYSVLVVAKVEKGKSKKLKSVKELLGITIMERSSFEKNPIDFLEAKGYKEVKKDLIIKLPKYSLFELENGRKRMLASAGELQKGNELALPSKYVNFLYLASHYEKLKGSPEDNEQKQLFVEQHKHYLDEIIEQISEFSKRVILADANLDKVLSAYNKHRDKPIREQAENIIHLFTLTNLGAPAAFKYFDTTIDRKRYTSTKEVLDATLIHQSITGLYETRIDLSQLGGDEGADKRTADGSEFESPKKKRKV

SEQ ID NO: 339 - protein, 1588 aa, synthetic construct
  REGION 1..1588: note = ABE8.20-m polypeptide sequence
  REGION 1..167: note = MISC_FEATURE - Adenosine deaminase sequence
  REGION 168..199: note = MISC_FEATURE - Linker sequence
  REGION 200..1566: note = MISC_FEATURE - Sequence derived from Cas9
  REGION 1567..1588: note = MISC_FEATURE - Bipartite nuclear localization sequence
MSEVEFSHEYWMRHALTLAKRARDEREVPVGAVLVLNNRVIGEGWNRAIGLHDPTAHAEIMALRQGGLVMQNYRLYDATLYSTFEPCVMCAGAMIHSRIGRVVFGVRNAKTGAAGSLMDVLHHPGMNHRVEITEGILADECAALLCRFFRMPRRVFNAQKKAQSSTDSGGSSGGSSGSETPGTSESATPESSGGSSGGSDKKYSIGLAIGTNSVGWAVITDEYKVPSKKFKVLGNTDRHSIKKNLIGALLFDSGETAEATRLKRTARRRYTRRKNRICYLQEIFSNEMAKVDDSFFHRLEESFLVEEDKKHERHPIFGNIVDEVAYHEKYPTIYHLRKKLVDSTDKADLRLIYLALAHMIKFRGHFLIEGDLNPDNSDVDKLFIQLVQTYNQLFEENPINASGVDAKAILSARLSKSRRLENLIAQLPGEKKNGLFGNLIALSLGLTPNFKSNFDLAEDAKLQLSKDTYDDDLDNLLAQIGDQYADLFLAAKNLSDAILLSDILRVNTEITKAPLSASMIKRYDEHHQDLTLLKALVRQQLPEKYKEIFFDQSKNGYAGYIDGGASQEEFYKFIKPILEKMDGTEELLVKLNREDLLRKQRTFDNGSIPHQIHLGELHAILRRQEDFYPFLKDNREKIEKILTFRIPYYVGPLARGNSRFAWMTRKSEETITPWNFEEVVDKGASAQSFIERMTNFDKNLPNEKVLPKHSLLYEYFTVYNELTKVKYVTEGMRKPAFLSGEQKKAIVDLLFKTNRKVTVKQLKEDYFKKIECFDSVEISGVEDRFNASLGTYHDLLKIIKDKDFLDNEENEDILEDIVLTLTLFEDREMIEERLKTYAHLFDDKVMKQLKRRRYTGWGRLSRKLINGIRDKQSGKTILDFLKSDGFANRNFMQLIHDDSLTFKEDIQKAQVSGQGDSLHEHIANLAGSPAIKKGILQTVKVVDELVKVMGRHKPENIVIEMARENQTTQKGQKNSRERMKRIEEGIKELGSQILKEHPVENTQLQNEKLYLYYLQNGRDMYVDQELDINRLSDYDVDHIVPQSFLKDDSIDNKVLTRSDKNRGKSDNVPSEEVVKKMKNYWRQLLNAKLITQRKFDNLTKAERGGLSELDKAGFIKRQLVETRQITKHVAQILDSRMNTKYDENDKLIREVKVITLKSKLVSDFRKDFQFYKVREINNYHHAHDAYLNAVVGTALIKKYPKLESEFVYGDYKVYDVRKMIAKSEQEIGKATAKYFFYSNIMNFFKTEITLANGEIRKRPLIETNGETGEIVWDKGRDFATVRKVLSMPQVNIVKKTEVQTGGFSKESILPKRNSDKLIARKKDWDPKKYGGFDSPTVAYSVLVVAKVEKGKSKKLKSVKELLGITIMERSSFEKNPIDFLEAKGYKEVKKDLIIKLPKYSLFELENGRKRMLASAGELQKGNELALPSKYVNFLYLASHYEKLKGSPEDNEQKQLFVEQHKHYLDEIIEQISEFSKRVILADANLDKVLSAYNKHRDKPIREQAENIIHLFTLTNLGAPAAFKYFDTTIDRKRYTSTKEVLDATLIHQSITGLYETRIDLSQLGGDEGADKRTADGSEFESPKKKRKV

SEQ ID NO: 340 - protein, 1786 aa, synthetic construct
  REGION 1..1786: note = ABE8.20-d polypeptide sequence
  REGION 1..167: note = MISC_FEATURE - Adenosine deaminase sequence
  REGION 168..199: note = MISC_FEATURE - Linker sequence
  REGION 200..365: note = MISC_FEATURE - Adenosine deaminase sequence
  REGION 366..397: note = MISC_FEATURE - Linker sequence
  REGION 398..1764: note = MISC_FEATURE - Sequence derived from Cas9
  REGION 1765..1786: note = MISC_FEATURE - Bipartite nuclear localization sequence
MSEVEFSHEYWMRHALTLAKRAWDEREVPVGAVLVHNNRVIGEGWNRPIGRHDPTAHAEIMALRQGGLVMQNYRLIDATLYVTLEPCVMCAGAMIHSRIGRVVFGARDAKTGAAGSLMDVLHHPGMNHRVEITEGILADECAALLSDFFRMRRQEIKAQKKAQSSTDSGGSSGGSSGSETPGTSESATPESSGGSSGGSSEVEFSHEYWMRHALTLAKRARDEREVPVGAVLVLNNRVIGEGWNRAIGLHDPTAHAEIMALRQGGLVMQNYRLYDATLYSTFEPCVMCAGAMIHSRIGRVVFGVRNAKTGAAGSLMDVLHHPGMNHRVEITEGILADECAALLCRFFRMPRRVFNAQKKAQSSTDSGGSSGGSSGSETPGTSESATPESSGGSSGGSDKKYSIGLAIGTNSVGWAVITDEYKVPSKKFKVLGNTDRHSIKKNLIGALLFDSGETAEATRLKRTARRRYTRRKNRICYLQEIFSNEMAKVDDSFFHRLEESFLVEEDKKHERHPIFGNIVDEVAYHEKYPTIYHLRKKLVDSTDKADLRLIYLALAHMIKFRGHFLIEGDLNPDNSDVDKLFIQLVQTYNQLFEENPINASGVDAKAILSARLSKSRRLENLIAQLPGEKKNGLFGNLIALSLGLTPNFKSNFDLAEDAKLQLSKDTYDDDLDNLLAQIGDQYADLFLAAKNLSDAILLSDILRVNTEITKAPLSASMIKRYDEHHQDLTLLKALVRQQLPEKYKEIFFDQSKNGYAGYIDGGASQEEFYKFIKPILEKMDGTEELLVKLNREDLLRKQRTFDNGSIPHQIHLGELHAILRRQEDFYPFLKDNREKIEKILTFRIPYYVGPLARGNSRFAWMTRKSEETITPWNFEEVVDKGASAQSFIERMTNFDKNLPNEKVLPKHSLLYEYFTVYNELTKVKYVTEGMRKPAFLSGEQKKAIVDLLFKTNRKVTVKQLKEDYFKKIECFDSVEISGVEDRFNASLGTYHDLLKIIKDKDFLDNEENEDILEDIVLTLTLFEDREMIEERLKTYAHLFDDKVMKQLKRRRYTGWGRLSRKLINGIRDKQSGKTILDFLKSDGFANRNFMQLIHDDSLTFKEDIQKAQVSGQGDSLHEHIANLAGSPAIKKGILQTVKVVDELVKVMGRHKPENIVIEMARENQTTQKGQKNSRERMKRIEEGIKELGSQILKEHPVENTQLQNEKLYLYYLQNGRDMYVDQELDINRLSDYDVDHIVPQSFLKDDSIDNKVLTRSDKNRGKSDNVPSEEVVKKMKNYWRQLLNAKLITQRKFDNLTKAERGGLSELDKAGFIKRQLVETRQITKHVAQILDSRMNTKYDENDKLIREVKVITLKSKLVSDFRKDFQFYKVREINNYHHAHDAYLNAVVGTALIKKYPKLESEFVYGDYKVYDVRKMIAKSEQEIGKATAKYFFYSNIMNFFKTEITLANGEIRKRPLIETNGETGEIVWDKGRDFATVRKVLSMPQVNIVKKTEVQTGGFSKESILPKRNSDKLIARKKDWDPKKYGGFDSPTVAYSVLVVAKVEKGKSKKLKSVKELLGITIMERSSFEKNPIDFLEAKGYKEVKKDLIIKLPKYSLFELENGRKRMLASAGELQKGNELALPSKYVNFLYLASHYEKLKGSPEDNEQKQLFVEQHKHYLDEIIEQISEFSKRVILADANLDKVLSAYNKHRDKPIREQAENIIHLFTLTNLGAPAAFKYFDTTIDRKRYTSTKEVLDATLIHQSITGLYETRIDLSQLGGDEGADKRTADGSEFESPKKKRKV

SEQ ID NO: 341 - protein, 1588 aa, synthetic construct
  REGION 1..1588: note = 01. monoABE8.1_bpNLS + Y147T polypeptide sequence
MSEVEFSHEYWMRHALTLAKRARDEREVPVGAVLVLNNRVIGEGWNRAIGLHDPTAHAEIMALRQGGLVMQNYRLIDATLYVTFEPCVMCAGAMIHSRIGRVVFGVRNAKTGAAGSLMDVLHYPGMNHRVEITEGILADECAALLCTFFRMPRQVFNAQKKAQSSTDSGGSSGGSSGSETPGTSESATPESSGGSSGGSDKKYSIGLAIGTNSVGWAVITDEYKVPSKKFKVLGNTDRHSIKKNLIGALLFDSGETAEATRLKRTARRRYTRRKNRICYLQEIFSNEMAKVDDSFFHRLEESFLVEEDKKHERHPIFGNIVDEVAYHEKYPTIYHLRKKLVDSTDKADLRLIYLALAHMIKFRGHFLIEGDLNPDNSDVDKLFIQLVQTYNQLFEENPINASGVDAKAILSARLSKSRRLENLIAQLPGEKKNGLFGNLIALSLGLTPNFKSNFDLAEDAKLQLSKDTYDDDLDNLLAQIGDQYADLFLAAKNLSDAILLSDILRVNTEITKAPLSASMIKRYDEHHQDLTLLKALVRQQLPEKYKEIFFDQSKNGYAGYIDGGASQEEFYKFIKPILEKMDGTEELLVKLNREDLLRKQRTFDNGSIPHQIHLGELHAILRRQEDFYPFLKDNREKIEKILTFRIPYYVGPLARGNSRFAWMTRKSEETITPWNFEEVVDKGASAQSFIERMTNFDKNLPNEKVLPKHSLLYEYFTVYNELTKVKYVTEGMRKPAFLSGEQKKAIVDLLFKTNRKVTVKQLKEDYFKKIECFDSVEISGVEDRFNASLGTYHDLLKIIKDKDFLDNEENEDILEDIVLTLTLFEDREMIEERLKTYAHLFDDKVMKQLKRRRYTGWGRLSRKLINGIRDKQSGKTILDFLKSDGFANRNFMQLIHDDSLTFKEDIQKAQVSGQGDSLHEHIANLAGSPAIKKGILQTVKVVDELVKVMGRHKPENIVIEMARENQTTQKGQKNSRERMKRIEEGIKELGSQILKEHPVENTQLQNEKLYLYYLQNGRDMYVDQELDINRLSDYDVDHIVPQSFLKDDSIDNKVLTRSDKNRGKSDNVPSEEVVKKMKNYWRQLLNAKLITQRKFDNLTKAERGGLSELDKAGFIKRQLVETRQITKHVAQILDSRMNTKYDENDKLIREVKVITLKSKLVSDFRKDFQFYKVREINNYHHAHDAYLNAVVGTALIKKYPKLESEFVYGDYKVYDVRKMIAKSEQEIGKATAKYFFYSNIMNFFKTEITLANGEIRKRPLIETNGETGEIVWDKGRDFATVRKVLSMPQVNIVKKTEVQTGGFSKESILPKRNSDKLIARKKDWDPKKYGGFVSPTVAYSVLVVAKVEKGKSKKLKSVKELLGITIMERSSFEKNPIDFLEAKGYKEVKKDLIIKLPKYSLFELENGRKRMLASARELQKGNELALPSKYVNFLYLASHYEKLKGSPEDNEQKQLFVEQHKHYLDEIIEQISEFSKRVILADANLDKVLSAYNKHRDKPIREQAENIIHLFTLTNLGAPAAFKYFDTTIDRKQYRSTKEVLDATLIHQSITGLYETRIDLSQLGGDEGADKRTADGSEFESPKKKRKV

SEQ ID NO: 342 - protein, 1588 aa, synthetic construct
  REGION 1..1588: note = 02. monoABE8.1_bpNLS + Y147R polypeptide sequence
MSEVEFSHEYWMRHALTLAKRARDEREVPVGAVLVLNNRVIGEGWNRAIGLHDPTAHAEIMALRQGGLVMQNYRLIDATLYVTFEPCVMCAGAMIHSRIGRVVFGVRNAKTGAAGSLMDVLHYPGMNHRVEITEGILADECAALLCRFFRMPRQVFNAQKKAQSSTDSGGSSGGSSGSETPGTSESATPESSGGSSGGSDKKYSIGLAIGTNSVGWAVITDEYKVPSKKFKVLGNTDRHSIKKNLIGALLFDSGETAEATRLKRTARRRYTRRKNRICYLQEIFSNEMAKVDDSFFHRLEESFLVEEDKKHERHPIFGNIVDEVAYHEKYPTIYHLRKKLVDSTDKADLRLIYLALAHMIKFRGHFLIEGDLNPDNSDVDKLFIQLVQTYNQLFEENPINASGVDAKAILSARLSKSRRLENLIAQLPGEKKNGLFGNLIALSLGLTPNFKSNFDLAEDAKLQLSKDTYDDDLDNLLAQIGDQYADLFLAAKNLSDAILLSDILRVNTEITKAPLSASMIKRYDEHHQDLTLLKALVRQQLPEKYKEIFFDQSKNGYAGYIDGGASQEEFYKFIKPILEKMDGTEELLVKLNREDLLRKQRTFDNGSIPHQIHLGELHAILRRQEDFYPFLKDNREKIEKILTFRIPYYVGPLARGNSRFAWMTRKSEETITPWNFEEVVDKGASAQSFIERMTNFDKNLPNEKVLPKHSLLYEYFTVYNELTKVKYVTEGMRKPAFLSGEQKKAIVDLLFKTNRKVTVKQLKEDYFKKIECFDSVEISGVEDRFNASLGTYHDLLKIIKDKDFLDNEENEDILEDIVLTLTLFEDREMIEERLKTYAHLFDDKVMKQLKRRRYTGWGRLSRKLINGIRDKQSGKTILDFLKSDGFANRNFMQLIHDDSLTFKEDIQKAQVSGQGDSLHEHIANLAGSPAIKKGILQTVKVVDELVKVMGRHKPENIVIEMARENQTTQKGQKNSRERMKRIEEGIKELGSQILKEHPVENTQLQNEKLYLYYLQNGRDMYVDQELDINRLSDYDVDHIVPQSFLKDDSIDNKVLTRSDKNRGKSDNVPSEEVVKKMKNYWRQLLNAKLITQRKFDNLTKAERGGLSELDKAGFIKRQLVETRQITKHVAQILDSRMNTKYDENDKLIREVKVITLKSKLVSDFRKDFQFYKVREINNYHHAHDAYLNAVVGTALIKKYPKLESEFVYGDYKVYDVRKMIAKSEQEIGKATAKYFFYSNIMNFFKTEITLANGEIRKRPLIETNGETGEIVWDKGRDFATVRKVLSMPQVNIVKKTEVQTGGFSKESILPKRNSDKLIARKKDWDPKKYGGFVSPTVAYSVLVVAKVEKGKSKKLKSVKELLGITIMERSSFEKNPIDFLEAKGYKEVKKDLIIKLPKYSLFELENGRKRMLASARELQKGNELALPSKYVNFLYLASHYEKLKGSPEDNEQKQLFVEQHKHYLDEIIEQISEFSKRVILADANLDKVLSAYNKHRDKPIREQAENIIHLFTLTNLGAPAAFKYFDTTIDRKQYRSTKEVLDATLIHQSITGLYETRIDLSQLGGDEGADKRTADGSEFESPKKKRKV

SEQ ID NO: 343 - protein, 1588 aa, synthetic construct
  REGION 1..1588: note = 03. monoABE8.1_bpNLS + Q154S polypeptide sequence
MSEVEFSHEYWMRHALTLAKRARDEREVPVGAVLVLNNRVIGEGWNRAIGLHDPTAHAEIMALRQGGLVMQNYRLIDATLYVTFEPCVMCAGAMIHSRIGRVVFGVRNAKTGAAGSLMDVLHYPGMNHRVEITEGILADECAALLCYFFRMPRSVFNAQKKAQSSTDSGGSSGGSSGSETPGTSESATPESSGGSSGGSDKKYSIGLAIGTNSVGWAVITDEYKVPSKKFKVLGNTDRHSIKKNLIGALLFDSGETAEATRLKRTARRRYTRRKNRICYLQEIFSNEMAKVDDSFFHRLEESFLVEEDKKHERHPIFGNIVDEVAYHEKYPTIYHLRKKLVDSTDKADLRLIYLALAHMIKFRGHFLIEGDLNPDNSDVDKLFIQLVQTYNQLFEENPINASGVDAKAILSARLSKSRRLENLIAQLPGEKKNGLFGNLIALSLGLTPNFKSNFDLAEDAKLQLSKDTYDDDLDNLLAQIGDQYADLFLAAKNLSDAILLSDILRVNTEITKAPLSASMIKRYDEHHQDLTLLKALVRQQLPEKYKEIFFDQSKNGYAGYIDGGASQEEFYKFIKPILEKMDGTEELLVKLNREDLLRKQRTFDNGSIPHQIHLGELHAILRRQEDFYPFLKDNREKIEKILTFRIPYYVGPLARGNSRFAWMTRKSEETITPWNFEEVVDKGASAQSFIERMTNFDKNLPNEKVLPKHSLLYEYFTVYNELTKVKYVTEGMRKPAFLSGEQKKAIVDLLFKTNRKVTVKQLKEDYFKKIECFDSVEISGVEDRFNASLGTYHDLLKIIKDKDFLDNEENEDILEDIVLTLTLFEDREMIEERLKTYAHLFDDKVMKQLKRRRYTGWGRLSRKLINGIRDKQSGKTILDFLKSDGFANRNFMQLIHDDSLTFKEDIQKAQVSGQGDSLHEHIANLAGSPAIKKGILQTVKVVDELVKVMGRHKPENIVIEMARENQTTQKGQKNSRERMKRIEEGIKELGSQILKEHPVENTQLQNEKLYLYYLQNGRDMYVDQELDINRLSDYDVDHIVPQSFLKDDSIDNKVLTRSDKNRGKSDNVPSEEVVKKMKNYWRQLLNAKLITQRKFDNLTKAERGGLSELDKAGFIKRQLVETRQITKHVAQILDSRMNTKYDENDKLIREVKVITLKSKLVSDFRKDFQFYKVREINNYHHAHDAYLNAVVGTALIKKYPKLESEFVYGDYKVYDVRKMIAKSEQEIGKATAKYFFYSNIMNFFKTEITLANGEIRKRPLIETNGETGEIVWDKGRDFATVRKVLSMPQVNIVKKTEVQTGGFSKESILPKRNSDKLIARKKDWDPKKYGGFVSPTVAYSVLVVAKVEKGKSKKLKSVKELLGITIMERSSFEKNPIDFLEAKGYKEVKKDLIIKLPKYSLFELENGRKRMLASARELQKGNELALPSKYVNFLYLASHYEKLKGSPEDNEQKQLFVEQHKHYLDEIIEQISEFSKRVILADANLDKVLSAYNKHRDKPIREQAENIIHLFTLTNLGAPAAFKYFDTTIDRKQYRSTKEVLDATLIHQSITGLYETRIDLSQLGGDEGADKRTADGSEFESPKKKRKV

SEQ ID NO: 344 - protein, 1588 aa, synthetic construct
  REGION 1..1588: note = 04. monoABE8.1_bpNLS + Y123H polypeptide sequence
MSEVEFSHEYWMRHALTLAKRARDEREVPVGAVLVLNNRVIGEGWNRAIGLHDPTAHAEIMALRQGGLVMQNYRLIDATLYVTFEPCVMCAGAMIHSRIGRVVFGVRNAKTGAAGSLMDVLHHPGMNHRVEITEGILADECAALLCYFFRMPRQVFNAQKKAQSSTDSGGSSGGSSGSETPGTSESATPESSGGSSGGSDKKYSIGLAIGTNSVGWAVITDEYKVPSKKFKVLGNTDRHSIKKNLIGALLFDSGETAEATRLKRTARRRYTRRKNRICYLQEIFSNEMAKVDDSFFHRLEESFLVEEDKKHERHPIFGNIVDEVAYHEKYPTIYHLRKKLVDSTDKADLRLIYLALAHMIKFRGHFLIEGDLNPDNSDVDKLFIQLVQTYNQLFEENPINASGVDAKAILSARLSKSRRLENLIAQLPGEKKNGLFGNLIALSLGLTPNFKSNFDLAEDAKLQLSKDTYDDDLDNLLAQIGDQYADLFLAAKNLSDAILLSDILRVNTEITKAPLSASMIKRYDEHHQDLTLLKALVRQQLPEKYKEIFFDQSKNGYAGYIDGGASQEEFYKFIKPILEKMDGTEELLVKLNREDLLRKQRTFDNGSIPHQIHLGELHAILRRQEDFYPFLKDNREKIEKILTFRIPYYVGPLARGNSRFAWMTRKSEETITPWNFEEVVDKGASAQSFIERMTNFDKNLPNEKVLPKHSLLYEYFTVYNELTKVKYVTEGMRKPAFLSGEQKKAIVDLLFKTNRKVTVKQLKEDYFKKIECFDSVEISGVEDRFNASLGTYHDLLKIIKDKDFLDNEENEDILEDIVLTLTLFEDREMIEERLKTYAHLFDDKVMKQLKRRRYTGWGRLSRKLINGIRDKQSGKTILDFLKSDGFANRNFMQLIHDDSLTFKEDIQKAQVSGQGDSLHEHIANLAGSPAIKKGILQTVKVVDELVKVMGRHKPENIVIEMARENQTTQKGQKNSRERMKRIEEGIKELGSQILKEHPVENTQLQNEKLYLYYLQNGRDMYVDQELDINRLSDYDVDHIVPQSFLKDDSIDNKVLTRSDKNRGKSDNVPSEEVVKKMKNYWRQLLNAKLITQRKFDNLTKAERGGLSELDKAGFIKRQLVETRQITKHVAQILDSRMNTKYDENDKLIREVKVITLKSKLVSDFRKDFQFYKVREINNYHHAHDAYLNAVVGTALIKKYPKLESEFVYGDYKVYDVRKMIAKSEQEIGKATAKYFFYSNIMNFFKTEITLANGEIRKRPLIETNGETGEIVWDKGRDFATVRKVLSMPQVNIVKKTEVQTGGFSKESILPKRNSDKLIARKKDWDPKKYGGFVSPTVAYSVLVVAKVEKGKSKKLKSVKELLGITIMERSSFEKNPIDFLEAKGYKEVKKDLIIKLPKYSLFELENGRKRMLASARELQKGNELALPSKYVNFLYLASHYEKLKGSPEDNEQKQLFVEQHKHYLDEIIEQISEFSKRVILADANLDKVLSAYNKHRDKPIREQAENIIHLFTLTNLGAPAAFKYFDTTIDRKQYRSTKEVLDATLIHQSITGLYETRIDLSQLGGDEGADKRTADGSEFESPKKKRKV

SEQ ID NO: 345 - protein, 1588 aa, synthetic construct
  REGION 1..1588: note = 05. monoABE8.1_bpNLS + V82S polypeptide sequence
MSEVEFSHEYWMRHALTLAKRARDEREVPVGAVLVLNNRVIGEGWNRAIGLHDPTAHAEIMALRQGGLVMQNYRLIDATLYSTFEPCVMCAGAMIHSRIGRVVFGVRNAKTGAAGSLMDVLHYPGMNHRVEITEGILADECAALLCYFFRMPRQVFNAQKKAQSSTDSGGSSGGSSGSETPGTSESATPESSGGSSGGSDKKYSIGLAIGTNSVGWAVITDEYKVPSKKFKVLGNTDRHSIKKNLIGALLFDSGETAEATRLKRTARRRYTRRKNRICYLQEIFSNEMAKVDDSFFHRLEESFLVEEDKKHERHPIFGNIVDEVAYHEKYPTIYHLRKKLVDSTDKADLRLIYLALAHMIKFRGHFLIEGDLNPDNSDVDKLFIQLVQTYNQLFEENPINASGVDAKAILSARLSKSRRLENLIAQLPGEKKNGLFGNLIALSLGLTPNFKSNFDLAEDAKLQLSKDTYDDDLDNLLAQIGDQYADLFLAAKNLSDAILLSDILRVNTEITKAPLSASMIKRYDEHHQDLTLLKALVRQQLPEKYKEIFFDQSKNGYAGYIDGGASQEEFYKFIKPILEKMDGTEELLVKLNREDLLRKQRTFDNGSIPHQIHLGELHAILRRQEDFYPFLKDNREKIEKILTFRIPYYVGPLARGNSRFAWMTRKSEETITPWNFEEVVDKGASAQSFIERMTNFDKNLPNEKVLPKHSLLYEYFTVYNELTKVKYVTEGMRKPAFLSGEQKKAIVDLLFKTNRKVTVKQLKEDYFKKIECFDSVEISGVEDRFNASLGTYHDLLKIIKDKDFLDNEENEDILEDIVLTLTLFEDREMIEERLKTYAHLFDDKVMKQLKRRRYTGWGRLSRKLINGIRDKQSGKTILDFLKSDGFANRNFMQLIHDDSLTFKEDIQKAQVSGQGDSLHEHIANLAGSPAIKKGILQTVKVVDELVKVMGRHKPENIVIEMARENQTTQKGQKNSRERMKRIEEGIKELGSQILKEHPVENTQLQNEKLYLYYLQNGRDMYVDQELDINRLSDYDVDHIVPQSFLKDDSIDNKVLTRSDKNRGKSDNVPSEEVVKKMKNYWRQLLNAKLITQRKFDNLTKAERGGLSELDKAGFIKRQLVETRQITKHVAQILDSRMNTKYDENDKLIREVKVITLKSKLVSDFRKDFQFYKVREINNYHHAHDAYLNAVVGTALIKKYPKLESEFVYGDYKVYDVRKMIAKSEQEIGKATAKYFFYSNIMNFFKTEITLANGEIRKRPLIETNGETGEIVWDKGRDFATVRKVLSMPQVNIVKKTEVQTGGFSKESILPKRNSDKLIARKKDWDPKKYGGFVSPTVAYSVLVVAKVEKGKSKKLKSVKELLGITIMERSSFEKNPIDFLEAKGYKEVKKDLIIKLPKYSLFELENGRKRMLASARELQKGNELALPSKYVNFLYLASHYEKLKGSPEDNEQKQLFVEQHKHYLDEIIEQISEFSKRVILADANLDKVLSAYNKHRDKPIREQAENIIHLFTLTNLGAPAAFKYFDTTIDRKQYRSTKEVLDATLIHQSITGLYETRIDLSQLGGDEGADKRTADGSEFESPKKKRKV

SEQ ID NO: 346 - protein, 1588 aa, synthetic construct
  REGION 1..1588: note = 06. monoABE8.1_bpNLS + T166R polypeptide sequence
MSEVEFSHEYWMRHALTLAKRARDEREVPVGAVLVLNNRVIGEGWNRAIGLHDPTAHAEIMALRQGGLVMQNYRLIDATLYVTFEPCVMCAGAMIHSRIGRVVFGVRNAKTGAAGSLMDVLHYPGMNHRVEITEGILADECAALLCYFFRMPRQVFNAQKKAQSSRDSGGSSGGSSGSETPGTSESATPESSGGSSGGSDKKYSIGLAIGTNSVGWAVITDEYKVPSKKFKVLGNTDRHSIKKNLIGALLFDSGETAEATRLKRTARRRYTRRKNRICYLQEIFSNEMAKVDDSFFHRLEESFLVEEDKKHERHPIFGNIVDEVAYHEKYPTIYHLRKKLVDSTDKADLRLIYLALAHMIKFRGHFLIEGDLNPDNSDVDKLFIQLVQTYNQLFEENPINASGVDAKAILSARLSKSRRLENLIAQLPGEKKNGLFGNLIALSLGLTPNFKSNFDLAEDAKLQLSKDTYDDDLDNLLAQIGDQYADLFLAAKNLSDAILLSDILRVNTEITKAPLSASMIKRYDEHHQDLTLLKALVRQQLPEKYKEIFFDQSKNGYAGYIDGGASQEEFYKFIKPILEKMDGTEELLVKLNREDLLRKQRTFDNGSIPHQIHLGELHAILRRQEDFYPFLKDNREKIEKILTFRIPYYVGPLARGNSRFAWMTRKSEETITPWNFEEVVDKGASAQSFIERMTNFDKNLPNEKVLPKHSLLYEYFTVYNELTKVKYVTEGMRKPAFLSGEQKKAIVDLLFKTNRKVTVKQLKEDYFKKIECFDSVEISGVEDRFNASLGTYHDLLKIIKDKDFLDNEENEDILEDIVLTLTLFEDREMIEERLKTYAHLFDDKVMKQLKRRRYTGWGRLSRKLINGIRDKQSGKTILDFLKSDGFANRNFMQLIHDDSLTFKEDIQKAQVSGQGDSLHEHIANLAGSPAIKKGILQTVKVVDELVKVMGRHKPENIVIEMARENQTTQKGQKNSRERMKRIEEGIKELGSQILKEHPVENTQLQNEKLYLYYLQNGRDMYVDQELDINRLSDYDVDHIVPQSFLKDDSIDNKVLTRSDKNRGKSDNVPSEEVVKKMKNYWRQLLNAKLITQRKFDNLTKAERGGLSELDKAGFIKRQLVETRQITKHVAQILDSRMNTKYDENDKLIREVKVITLKSKLVSDFRKDFQFYKVREINNYHHAHDAYLNAVVGTALIKKYPKLESEFVYGDYKVYDVRKMIAKSEQEIGKATAKYFFYSNIMNFFKTEITLANGEIRKRPLIETNGETGEIVWDKGRDFATVRKVLSMPQVNIVKKTEVQTGGFSKESILPKRNSDKLIARKKDWDPKKYGGFVSPTVAYSVLVVAKVEKGKSKKLKSVKELLGITIMERSSFEKNPIDFLEAKGYKEVKKDLIIKLPKYSLFELENGRKRMLASARELQKGNELALPSKYVNFLYLASHYEKLKGSPEDNEQKQLFVEQHKHYLDEIIEQISEFSKRVILADANLDKVLSAYNKHRDKPIREQAENIIHLFTLTNLGAPAAFKYFDTTIDRKQYRSTKEVLDATLIHQSITGLYETRIDLSQLGGDEGADKRTADGSEFESPKKKRKV

SEQ ID NO: 347 - protein, 1588 aa, synthetic construct
  REGION 1..1588: note = 07. monoABE8.1_bpNLS + Q154R polypeptide sequence
MSEVEFSHEYWMRHALTLAKRARDEREVPVGAVLVLNNRVIGEGWNRAIGLHDPTAHAEIMALRQGGLVMQNYRLIDATLYVTFEPCVMCAGAMIHSRIGRVVFGVRNAKTGAAGSLMDVLHYPGMNHRVEITEGILADECAALLCYFFRMPRRVFNAQKKAQSSTDSGGSSGGSSGSETPGTSESATPESSGGSSGGSDKKYSIGLAIGTNSVGWAVITDEYKVPSKKFKVLGNTDRHSIKKNLIGALLFDSGETAEATRLKRTARRRYTRRKNRICYLQEIFSNEMAKVDDSFFHRLEESFLVEEDKKHERHPIFGNIVDEVAYHEKYPTIYHLRKKLVDSTDKADLRLIYLALAHMIKFRGHFLIEGDLNPDNSDVDKLFIQLVQTYNQLFEENPINASGVDAKAILSARLSKSRRLENLIAQLPGEKKNGLFGNLIALSLGLTPNFKSNFDLAEDAKLQLSKDTYDDDLDNLLAQIGDQYADLFLAAKNLSDAILLSDILRVNTEITKAPLSASMIKRYDEHHQDLTLLKALVRQQLPEKYKEIFFDQSKNGYAGYIDGGASQEEFYKFIKPILEKMDGTEELLVKLNREDLLRKQRTFDNGSIPHQIHLGELHAILRRQEDFYPFLKDNREKIEKILTFRIPYYVGPLARGNSRFAWMTRKSEETITPWNFEEVVDKGASAQSFIERMTNFDKNLPNEKVLPKHSLLYEYFTVYNELTKVKYVTEGMRKPAFLSGEQKKAIVDLLFKTNRKVTVKQLKEDYFKKIECFDSVEISGVEDRFNASLGTYHDLLKIIKDKDFLDNEENEDILEDIVLTLTLFEDREMIEERLKTYAHLFDDKVMKQLKRRRYTGWGRLSRKLINGIRDKQSGKTILDFLKSDGFANRNFMQLIHDDSLTFKEDIQKAQVSGQGDSLHEHIANLAGSPAIKKGILQTVKVVDELVKVMGRHKPENIVIEMARENQTTQKGQKNSRERMKRIEEGIKELGSQILKEHPVENTQLQNEKLYLYYLQNGRDMYVDQELDINRLSDYDVDHIVPQSFLKDDSIDNKVLTRSDKNRGKSDNVPSEEVVKKMKNYWRQLLNAKLITQRKFDNLTKAERGGLSELDKAGFIKRQLVETRQITKHVAQILDSRMNTKYDENDKLIREVKVITLKSKLVSDFRKDFQFYKVREINNYHHAHDAYLNAVVGTALIKKYPKLESEFVYGDYKVYDVRKMIAKSEQEIGKATAKYFFYSNIMNFFKTEITLANGEIRKRPLIETNGETGEIVWDKGRDFATVRKVLSMPQVNIVKKTEVQTGGFSKESILPKRNSDKLIARKKDWDPKKYGGFVSPTVAYSVLVVAKVEKGKSKKLKSVKELLGITIMERSSFEKNPIDFLEAKGYKEVKKDLIIKLPKYSLFELENGRKRMLASARELQKGNELALPSKYVNFLYLASHYEKLKGSPEDNEQKQLFVEQHKHYLDEIIEQISEFSKRVILADANLDKVLSAYNKHRDKPIREQAENIIHLFTLTNLGAPAAFKYFDTTIDRKQYRSTKEVLDATLIHQSITGLYETRIDLSQLGGDEGADKRTADGSEFESPKKKRKV

SEQ ID NO: 348 - protein, 1588 aa, synthetic construct
  REGION 1..1588: note = 08. monoABE8.1_bpNLS +Y147R_Q154R_Y123H polypeptide sequence
MSEVEFSHEYWMRHALTLAKRARDEREVPVGAVLVLNNRVIGEGWNRAIGLHDPTAHAEIMALRQGGLVMQNYRLIDATLYVTFEPCVMCAGAMIHSRIGRVVFGVRNAKTGAAGSLMDVLHHPGMNHRVEITEGILADECAALLCRFFRMPRRVFNAQKKAQSSTDSGGSSGGSSGSETPGTSESATPESSGGSSGGSDKKYSIGLAIGTNSVGWAVITDEYKVPSKKFKVLGNTDRHSIKKNLIGALLFDSGETAEATRLKRTARRRYTRRKNRICYLQEIFSNEMAKVDDSFFHRLEESFLVEEDKKHERHPIFGNIVDEVAYHEKYPTIYHLRKKLVDSTDKADLRLIYLALAHMIKFRGHFLIEGDLNPDNSDVDKLFIQLVQTYNQLFEENPINASGVDAKAILSARLSKSRRLENLIAQLPGEKKNGLFGNLIALSLGLTPNFKSNFDLAEDAKLQLSKDTYDDDLDNLLAQIGDQYADLFLAAKNLSDAILLSDILRVNTEITKAPLSASMIKRYDEHHQDLTLLKALVRQQLPEKYKEIFFDQSKNGYAGYIDGGASQEEFYKFIKPILEKMDGTEELLVKLNREDLLRKQRTFDNGSIPHQIHLGELHAILRRQEDFYPFLKDNREKIEKILTFRIPYYVGPLARGNSRFAWMTRKSEETITPWNFEEVVDKGASAQSFIERMTNFDKNLPNEKVLPKHSLLYEYFTVYNELTKVKYVTEGMRKPAFLSGEQKKAIVDLLFKTNRKVTVKQLKEDYFKKIECFDSVEISGVEDRFNASLGTYHDLLKIIKDKDFLDNEENEDILEDIVLTLTLFEDREMIEERLKTYAHLFDDKVMKQLKRRRYTGWGRLSRKLINGIRDKQSGKTILDFLKSDGFANRNFMQLIHDDSLTFKEDIQKAQVSGQGDSLHEHIANLAGSPAIKKGILQTVKVVDELVKVMGRHKPENIVIEMARENQTTQKGQKNSRERMKRIEEGIKELGSQILKEHPVENTQLQNEKLYLYYLQNGRDMYVDQELDINRLSDYDVDHIVPQSFLKDDSIDNKVLTRSDKNRGKSDNVPSEEVVKKMKNYWRQLLNAKLITQRKFDNLTKAERGGLSELDKAGFIKRQLVETRQITKHVAQILDSRMNTKYDENDKLIREVKVITLKSKLVSDFRKDFQFYKVREINNYHHAHDAYLNAVVGTALIKKYPKLESEFVYGDYKVYDVRKMIAKSEQEIGKATAKYFFYSNIMNFFKTEITLANGEIRKRPLIETNGETGEIVWDKGRDFATVRKVLSMPQVNIVKKTEVQTGGFSKESILPKRNSDKLIARKKDWDPKKYGGFVSPTVAYSVLVVAKVEKGKSKKLKSVKELLGITIMERSSFEKNPIDFLEAKGYKEVKKDLIIKLPKYSLFELENGRKRMLASARELQKGNELALPSKYVNFLYLASHYEKLKGSPEDNEQKQLFVEQHKHYLDEIIEQISEFSKRVILADANLDKVLSAYNKHRDKPIREQAENIIHLFTLTNLGAPAAFKYFDTTIDRKQYRSTKEVLDATLIHQSITGLYETRIDLSQLGGDEGADKRTADGSEFESPKKKRKV

SEQ ID NO: 349 - protein, 1588 aa, synthetic construct
  REGION 1..1588: note = 09. monoABE8.1_bpNLS +Y147R_Q154R_I76Y polypeptide sequence
MSEVEFSHEYWMRHALTLAKRARDEREVPVGAVLVLNNRVIGEGWNRAIGLHDPTAHAEIMALRQGGLVMQNYRLYDATLYVTFEPCVMCAGAMIHSRIGRVVFGVRNAKTGAAGSLMDVLHYPGMNHRVEITEGILADECAALLCRFFRMPRRVFNAQKKAQSSTDSGGSSGGSSGSETPGTSESATPESSGGSSGGSDKKYSIGLAIGTNSVGWAVITDEYKVPSKKFKVLGNTDRHSIKKNLIGALLFDSGETAEATRLKRTARRRYTRRKNRICYLQEIFSNEMAKVDDSFFHRLEESFLVEEDKKHERHPIFGNIVDEVAYHEKYPTIYHLRKKLVDSTDKADLRLIYLALAHMIKFRGHFLIEGDLNPDNSDVDKLFIQLVQTYNQLFEENPINASGVDAKAILSARLSKSRRLENLIAQLPGEKKNGLFGNLIALSLGLTPNFKSNFDLAEDAKLQLSKDTYDDDLDNLLAQIGDQYADLFLAAKNLSDAILLSDILRVNTEITKAPLSASMIKRYDEHHQDLTLLKALVRQQLPEKYKEIFFDQSKNGYAGYIDGGASQEEFYKFIKPILEKMDGTEELLVKLNREDLLRKQRTFDNGSIPHQIHLGELHAILRRQEDFYPFLKDNREKIEKILTFRIPYYVGPLARGNSRFAWMTRKSEETITPWNFEEVVDKGASAQSFIERMTNFDKNLPNEKVLPKHSLLYEYFTVYNELTKVKYVTEGMRKPAFLSGEQKKAIVDLLFKTNRKVTVKQLKEDYFKKIECFDSVEISGVEDRFNASLGTYHDLLKIIKDKDFLDNEENEDILEDIVLTLTLFEDREMIEERLKTYAHLFDDKVMKQLKRRRYTGWGRLSRKLINGIRDKQSGKTILDFLKSDGFANRNFMQLIHDDSLTFKEDIQKAQVSGQGDSLHEHIANLAGSPAIKKGILQTVKVVDELVKVMGRHKPENIVIEMARENQTTQKGQKNSRERMKRIEEGIKELGSQILKEHPVENTQLQNEKLYLYYLQNGRDMYVDQELDINRLSDYDVDHIVPQSFLKDDSIDNKVLTRSDKNRGKSDNVPSEEVVKKMKNYWRQLLNAKLITQRKFDNLTKAERGGLSELDKAGFIKRQLVETRQITKHVAQILDSRMNTKYDENDKLIREVKVITLKSKLVSDFRKDFQFYKVREINNYHHAHDAYLNAVVGTALIKKYPKLESEFVYGDYKVYDVRKMIAKSEQEIGKATAKYFFYSNIMNFFKTEITLANGEIRKRPLIETNGETGEIVWDKGRDFATVRKVLSMPQVNIVKKTEVQTGGFSKESILPKRNSDKLIARKKDWDPKKYGGFVSPTVAYSVLVVAKVEKGKSKKLKSVKELLGITIMERSSFEKNPIDFLEAKGYKEVKKDLIIKLPKYSLFELENGRKRMLASARELQKGNELALPSKYVNFLYLASHYEKLKGSPEDNEQKQLFVEQHKHYLDEIIEQISEFSKRVILADANLDKVLSAYNKHRDKPIREQAENIIHLFTLTNLGAPAAFKYFDTTIDRKQYRSTKEVLDATLIHQSITGLYETRIDLSQLGGDEGADKRTADGSEFESPKKKRKV

SEQ ID NO: 350 - protein, 1588 aa, synthetic construct
  REGION 1..1588: note = 10. monoABE8.1_bpNLS +Y147R_Q154R_T166R polypeptide sequence
MSEVEFSHEYWMRHALTLAKRARDEREVPVGAVLVLNNRVIGEGWNRAIGLHDPTAHAEIMALRQGGLVMQNYRLIDATLYVTFEPCVMCAGAMIHSRIGRVVFGVRNAKTGAAGSLMDVLHYPGMNHRVEITEGILADECAALLCRFFRMPRRVFNAQKKAQSSRDSGGSSGGSSGSETPGTSESATPESSGGSSGGSDKKYSIGLAIGTNSVGWAVITDEYKVPSKKFKVLGNTDRHSIKKNLIGALLFDSGETAEATRLKRTARRRYTRRKNRICYLQEIFSNEMAKVDDSFFHRLEESFLVEEDKKHERHPIFGNIVDEVAYHEKYPTIYHLRKKLVDSTDKADLRLIYLALAHMIKFRGHFLIEGDLNPDNSDVDKLFIQLVQTYNQLFEENPINASGVDAKAILSARLSKSRRLENLIAQLPGEKKNGLFGNLIALSLGLTPNFKSNFDLAEDAKLQLSKDTYDDDLDNLLAQIGDQYADLFLAAKNLSDAILLSDILRVNTEITKAPLSASMIKRYDEHHQDLTLLKALVRQQLPEKYKEIFFDQSKNGYAGYIDGGASQEEFYKFIKPILEKMDGTEELLVKLNREDLLRKQRTFDNGSIPHQIHLGELHAILRRQEDFYPFLKDNREKIEKILTFRIPYYVGPLARGNSRFAWMTRKSEETITPWNFEEVVDKGASAQSFIERMTNFDKNLPNEKVLPKHSLLYEYFTVYNELTKVKYVTEGMRKPAFLSGEQKKAIVDLLFKTNRKVTVKQLKEDYFKKIECFDSVEISGVEDRFNASLGTYHDLLKIIKDKDFLDNEENEDILEDIVLTLTLFEDREMIEERLKTYAHLFDDKVMKQLKRRRYTGWGRLSRKLINGIRDKQSGKTILDFLKSDGFANRNFMQLIHDDSLTFKEDIQKAQVSGQGDSLHEHIANLAGSPAIKKGILQTVKVVDELVKVMGRHKPENIVIEMARENQTTQKGQKNSRERMKRIEEGIKELGSQILKEHPVENTQLQNEKLYLYYLQNGRDMYVDQELDINRLSDYDVDHIVPQSFLKDDSIDNKVLTRSDKNRGKSDNVPSEEVVKKMKNYWRQLLNAKLITQRKFDNLTKAERGGLSELDKAGFIKRQLVETRQITKHVAQILDSRMNTKYDENDKLIREVKVITLKSKLVSDFRKDFQFYKVREINNYHHAHDAYLNAVVGTALIKKYPKLESEFVYGDYKVYDVRKMIAKSEQEIGKATAKYFFYSNIMNFFKTEITLANGEIRKRPLIETNGETGEIVWDKGRDFATVRKVLSMPQVNIVKKTEVQTGGFSKESILPKRNSDKLIARKKDWDPKKYGGFVSPTVAYSVLVVAKVEKGKSKKLKSVKELLGITIMERSSFEKNPIDFLEAKGYKEVKKDLIIKLPKYSLFELENGRKRMLASARELQKGNELALPSKYVNFLYLASHYEKLKGSPEDNEQKQLFVEQHKHYLDEIIEQISEFSKRVILADANLDKVLSAYNKHRDKPIREQAENIIHLFTLTNLGAPAAFKYFDTTIDRKQYRSTKEVLDATLIHQSITGLYETRIDLSQLGGDEGADKRTADGSEFESPKKKRKV

SEQ ID NO: 351 - protein, 1588 aa, synthetic construct
  REGION 1..1588: note = 11. monoABE8.1_bpNLS +Y147T_Q154R polypeptide sequence
MSEVEFSHEYWMRHALTLAKRARDEREVPVGAVLVLNNRVIGEGWNRAIGLHDPTAHAEIMALRQGGLVMQNYRLIDATLYVTFEPCVMCAGAMIHSRIGRVVFGVRNAKTGAAGSLMDVLHYPGMNHRVEITEGILADECAALLCTFFRMPRRVFNAQKKAQSSTDSGGSSGGSSGSETPGTSESATPESSGGSSGGSDKKYSIGLAIGTNSVGWAVITDEYKVPSKKFKVLGNTDRHSIKKNLIGALLFDSGETAEATRLKRTARRRYTRRKNRICYLQEIFSNEMAKVDDSFFHRLEESFLVEEDKKHERHPIFGNIVDEVAYHEKYPTIYHLRKKLVDSTDKADLRLIYLALAHMIKFRGHFLIEGDLNPDNSDVDKLFIQLVQTYNQLFEENPINASGVDAKAILSARLSKSRRLENLIAQLPGEKKNGLFGNLIALSLGLTPNFKSNFDLAEDAKLQLSKDTYDDDLDNLLAQIGDQYADLFLAAKNLSDAILLSDILRVNTEITKAPLSASMIKRYDEHHQDLTLLKALVRQQLPEKYKEIFFDQSKNGYAGYIDGGASQEEFYKFIKPILEKMDGTEELLVKLNREDLLRKQRTFDNGSIPHQIHLGELHAILRRQEDFYPFLKDNREKIEKILTFRIPYYVGPLARGNSRFAWMTRKSEETITPWNFEEVVDKGASAQSFIERMTNFDKNLPNEKVLPKHSLLYEYFTVYNELTKVKYVTEGMRKPAFLSGEQKKAIVDLLFKTNRKVTVKQLKEDYFKKIECFDSVEISGVEDRFNASLGTYHDLLKIIKDKDFLDNEENEDILEDIVLTLTLFEDREMIEERLKTYAHLFDDKVMKQLKRRRYTGWGRLSRKLINGIRDKQSGKTILDFLKSDGFANRNFMQLIHDDSLTFKEDIQKAQVSGQGDSLHEHIANLAGSPAIKKGILQTVKVVDELVKVMGRHKPENIVIEMARENQTTQKGQKNSRERMKRIEEGIKELGSQILKEHPVENTQLQNEKLYLYYLQNGRDMYVDQELDINRLSDYDVDHIVPQSFLKDDSIDNKVLTRSDKNRGKSDNVPSEEVVKKMKNYWRQLLNAKLITQRKFDNLTKAERGGLSELDKAGFIKRQLVETRQITKHVAQILDSRMNTKYDENDKLIREVKVITLKSKLVSDFRKDFQFYKVREINNYHHAHDAYLNAVVGTALIKKYPKLESEFVYGDYKVYDVRKMIAKSEQEIGKATAKYFFYSNIMNFFKTEITLANGEIRKRPLIETNGETGEIVWDKGRDFATVRKVLSMPQVNIVKKTEVQTGGFSKESILPKRNSDKLIARKKDWDPKKYGGFVSPTVAYSVLVVAKVEKGKSKKLKSVKELLGITIMERSSFEKNPIDFLEAKGYKEVKKDLIIKLPKYSLFELENGRKRMLASARELQKGNELALPSKYVNFLYLASHYEKLKGSPEDNEQKQLFVEQHKHYLDEIIEQISEFSKRVILADANLDKVLSAYNKHRDKPIREQAENIIHLFTLTNLGAPAAFKYFDTTIDRKQYRSTKEVLDATLIHQSITGLYETRIDLSQLGGDEGADKRTADGSEFESPKKKRKV

SEQ ID NO: 352 - protein, 1588 aa, synthetic construct
  REGION 1..1588: note = 12. monoABE8.1_bpNLS +Y147T_Q154S polypeptide sequence
MSEVEFSHEYWMRHALTLAKRARDEREVPVGAVLVLNNRVIGEGWNRAIGLHDPTAHAEIMALRQGGLVMQNYRLIDATLYVTFEPCVMCAGAMIHSRIGRVVFGVRNAKTGAAGSLMDVLHYPGMNHRVEITEGILADECAALLCTFFRMPRSVFNAQKKAQSSTDSGGSSGGSSGSETPGTSESATPESSGGSSGGSDKKYSIGLAIGTNSVGWAVITDEYKVPSKKFKVLGNTDRHSIKKNLIGALLFDSGETAEATRLKRTARRRYTRRKNRICYLQEIFSNEMAKVDDSFFHRLEESFLVEEDKKHERHPIFGNIVDEVAYHEKYPTIYHLRKKLVDSTDKADLRLIYLALAHMIKFRGHFLIEGDLNPDNSDVDKLFIQLVQTYNQLFEENPINASGVDAKAILSARLSKSRRLENLIAQLPGEKKNGLFGNLIALSLGLTPNFKSNFDLAEDAKLQLSKDTYDDDLDNLLAQIGDQYADLFLAAKNLSDAILLSDILRVNTEITKAPLSASMIKRYDEHHQDLTLLKALVRQQLPEKYKEIFFDQSKNGYAGYIDGGASQEEFYKFIKPILEKMDGTEELLVKLNREDLLRKQRTFDNGSIPHQIHLGELHAILRRQEDFYPFLKDNREKIEKILTFRIPYYVGPLARGNSRFAWMTRKSEETITPWNFEEVVDKGASAQSFIERMTNFDKNLPNEKVLPKHSLLYEYFTVYNELTKVKYVTEGMRKPAFLSGEQKKAIVDLLFKTNRKVTVKQLKEDYFKKIECFDSVEISGVEDRFNASLGTYHDLLKIIKDKDFLDNEENEDILEDIVLTLTLFEDREMIEERLKTYAHLFDDKVMKQLKRRRYTGWGRLSRKLINGIRDKQSGKTILDFLKSDGFANRNFMQLIHDDSLTFKEDIQKAQVSGQGDSLHEHIANLAGSPAIKKGILQTVKVVDELVKVMGRHKPENIVIEMARENQTTQKGQKNSRERMKRIEEGIKELGSQILKEHPVENTQLQNEKLYLYYLQNGRDMYVDQELDINRLSDYDVDHIVPQSFLKDDSIDNKVLTRSDKNRGKSDNVPSEEVVKKMKNYWRQLLNAKLITQRKFDNLTKAERGGLSELDKAGFIKRQLVETRQITKHVAQILDSRMNTKYDENDKLIREVKVITLKSKLVSDFRKDFQFYKVREINNYHHAHDAYLNAVVGTALIKKYPKLESEFVYGDYKVYDVRKMIAKSEQEIGKATAKYFFYSNIMNFFKTEITLANGEIRKRPLIETNGETGEIVWDKGRDFATVRKVLSMPQVNIVKKTEVQTGGFSKESILPKRNSDKLIARKKDWDPKKYGGFVSPTVAYSVLVVAKVEKGKSKKLKSVKELLGITIMERSSFEKNPIDFLEAKGYKEVKKDLIIKLPKYSLFELENGRKRMLASARELQKGNELALPSKYVNFLYLASHYEKLKGSPEDNEQKQLFVEQHKHYLDEIIEQISEFSKRVILADANLDKVLSAYNKHRDKPIREQAENIIHLFTLTNLGAPAAFKYFDTTIDRKQYRSTKEVLDATLIHQSITGLYETRIDLSQLGGDEGADKRTADGSEFESPKKKRKV

SEQ ID NO: 353 - protein, 1588 aa, synthetic construct
  REGION 1..1588: note = 13. monoABE8.1_bpNLS +H123Y123H_Y147R_Q154R_I76Y polypeptide sequence
MSEVEFSHEYWMRHALTLAKRARDEREVPVGAVLVLNNRVIGEGWNRAIGLHDPTAHAEIMALRQGGLVMQNYRLYDATLYVTFEPCVMCAGAMIHSRIGRVVFGVRNAKTGAAGSLMDVLHHPGMNHRVEITEGILADECAALLCRFFRMPRRVFNAQKKAQSSTDSGGSSGGSSGSETPGTSESATPESSGGSSGGSDKKYSIGLAIGTNSVGWAVITDEYKVPSKKFKVLGNTDRHSIKKNLIGALLFDSGETAEATRLKRTARRRYTRRKNRICYLQEIFSNEMAKVDDSFFHRLEESFLVEEDKKHERHPIFGNIVDEVAYHEKYPTIYHLRKKLVDSTDKADLRLIYLALAHMIKFRGHFLIEGDLNPDNSDVDKLFIQLVQTYNQLFEENPINASGVDAKAILSARLSKSRRLENLIAQLPGEKKNGLFGNLIALSLGLTPNFKSNFDLAEDAKLQLSKDTYDDDLDNLLAQIGDQYADLFLAAKNLSDAILLSDILRVNTEITKAPLSASMIKRYDEHHQDLTLLKALVRQQLPEKYKEIFFDQSKNGYAGYIDGGASQEEFYKFIKPILEKMDGTEELLVKLNREDLLRKQRTFDNGSIPHQIHLGELHAILRRQEDFYPFLKDNREKIEKILTFRIPYYVGPLARGNSRFAWMTRKSEETITPWNFEEVVDKGASAQSFIERMTNFDKNLPNEKVLPKHSLLYEYFTVYNELTKVKYVTEGMRKPAFLSGEQKKAIVDLLFKTNRKVTVKQLKEDYFKKIECFDSVEISGVEDRFNASLGTYHDLLKIIKDKDFLDNEENEDILEDIVLTLTLFEDREMIEERLKTYAHLFDDKVMKQLKRRRYTGWGRLSRKLINGIRDKQSGKTILDFLKSDGFANRNFMQLIHDDSLTFKEDIQKAQVSGQGDSLHEHIANLAGSPAIKKGILQTVKVVDELVKVMGRHKPENIVIEMARENQTTQKGQKNSRERMKRIEEGIKELGSQILKEHPVENTQLQNEKLYLYYLQNGRDMYVDQELDINRLSDYDVDHIVPQSFLKDDSIDNKVLTRSDKNRGKSDNVPSEEVVKKMKNYWRQLLNAKLITQRKFDNLTKAERGGLSELDKAGFIKRQLVETRQITKHVAQILDSRMNTKYDENDKLIREVKVITLKSKLVSDFRKDFQFYKVREINNYHHAHDAYLNAVVGTALIKKYPKLESEFVYGDYKVYDVRKMIAKSEQEIGKATAKYFFYSNIMNFFKTEITLANGEIRKRPLIETNGETGEIVWDKGRDFATVRKVLSMPQVNIVKKTEVQTGGFSKESILPKRNSDKLIARKKDWDPKKYGGFVSPTVAYSVLVVAKVEKGKSKKLKSVKELLGITIMERSSFEKNPIDFLEAKGYKEVKKDLIIKLPKYSLFELENGRKRMLASARELQKGNELALPSKYVNFLYLASHYEKLKGSPEDNEQKQLFVEQHKHYLDEIIEQISEFSKRVILADANLDKVLSAYNKHRDKPIREQAENIIHLFTLTNLGAPAAFKYFDTTIDRKQYRSTKEVLDATLIHQSITGLYETRIDLSQLGGDEGADKRTADGSEFESPKKKRKV

SEQ ID NO: 354 - protein, 1588 aa, synthetic construct
  REGION 1..1588: note = 14. monoABE8.1_bpNLS + V82S +Q154R polypeptide sequence
MSEVEFSHEYWMRHALTLAKRARDEREVPVGAVLVLNNRVIGEGWNRAIGLHDPTAHAEIMALRQGGLVMQNYRLIDATLYSTFEPCVMCAGAMIHSRIGRVVFGVRNAKTGAAGSLMDVLHYPGMNHRVEITEGILADECAALLCYFFRMPRRVFNAQKKAQSSTDSGGSSGGSSGSETPGTSESATPESSGGSSGGSDKKYSIGLAIGTNSVGWAVITDEYKVPSKKFKVLGNTDRHSIKKNLIGALLFDSGETAEATRLKRTARRRYTRRKNRICYLQEIFSNEMAKVDDSFFHRLEESFLVEEDKKHERHPIFGNIVDEVAYHEKYPTIYHLRKKLVDSTDKADLRLIYLALAHMIKFRGHFLIEGDLNPDNSDVDKLFIQLVQTYNQLFEENPINASGVDAKAILSARLSKSRRLENLIAQLPGEKKNGLFGNLIALSLGLTPNFKSNFDLAEDAKLQLSKDTYDDDLDNLLAQIGDQYADLFLAAKNLSDAILLSDILRVNTEITKAPLSASMIKRYDEHHQDLTLLKALVRQQLPEKYKEIFFDQSKNGYAGYIDGGASQEEFYKFIKPILEKMDGTEELLVKLNREDLLRKQRTFDNGSIPHQIHLGELHAILRRQEDFYPFLKDNREKIEKILTFRIPYYVGPLARGNSRFAWMTRKSEETITPWNFEEVVDKGASAQSFIERMTNFDKNLPNEKVLPKHSLLYEYFTVYNELTKVKYVTEGMRKPAFLSGEQKKAIVDLLFKTNRKVTVKQLKEDYFKKIECFDSVEISGVEDRFNASLGTYHDLLKIIKDKDFLDNEENEDILEDIVLTLTLFEDREMIEERLKTYAHLFDDKVMKQLKRRRYTGWGRLSRKLINGIRDKQSGKTILDFLKSDGFANRNFMQLIHDDSLTFKEDIQKAQVSGQGDSLHEHIANLAGSPAIKKGILQTVKVVDELVKVMGRHKPENIVIEMARENQTTQKGQKNSRERMKRIEEGIKELGSQILKEHPVENTQLQNEKLYLYYLQNGRDMYVDQELDINRLSDYDVDHIVPQSFLKDDSIDNKVLTRSDKNRGKSDNVPSEEVVKKMKNYWRQLLNAKLITQRKFDNLTKAERGGLSELDKAGFIKRQLVETRQITKHVAQILDSRMNTKYDENDKLIREVKVITLKSKLVSDFRKDFQFYKVREINNYHHAHDAYLNAVVGTALIKKYPKLESEFVYGDYKVYDVRKMIAKSEQEIGKATAKYFFYSNIMNFFKTEITLANGEIRKRPLIETNGETGEIVWDKGRDFATVRKVLSMPQVNIVKKTEVQTGGFSKESILPKRNSDKLIARKKDWDPKKYGGFVSPTVAYSVLVVAKVEKGKSKKLKSVKELLGITIMERSSFEKNPIDFLEAKGYKEVKKDLIIKLPKYSLFELENGRKRMLASARELQKGNELALPSKYVNFLYLASHYEKLKGSPEDNEQKQLFVEQHKHYLDEIIEQISEFSKRVILADANLDKVLSAYNKHRDKPIREQAENIIHLFTLTNLGAPAAFKYFDTTIDRKQYRSTKEVLDATLIHQSITGLYETRIDLSQLGGDEGADKRTADGSEFESPKKKRKV

SEQ ID NO: 355 - protein, 4 aa, synthetic construct
  REGION 1..4: note = synthetic peptide sequence
SGGS

SEQ ID NO: 356 - protein, 24 aa, synthetic construct
  REGION 1..24: note = synthetic peptide sequence
SGGSSGSETPGTSESATPESSGGS

SEQ ID NO: 357 - protein, 32 aa, synthetic construct
  REGION 1..32: note = synthetic polypeptide sequence
SGGSSGGSSGSETPGTSESATPESSGGSSGGS

SEQ ID NO: 358 - protein, 104 aa, synthetic construct
  REGION 1..104: note = synthetic polypeptide sequence
GGSGGSPGSPAGSPTSTEEGTSESATPESGPGTSTEPSEGSAPGSPAGSPTSTEEGTSTEPSEGSAPGTSTEPSEGSAPGTSESATPESGPGSEPATSGGSGGS

SEQ ID NO: 359 - protein, 24 aa, synthetic construct
  REGION 1..24: note = synthetic peptide sequence
SGGSSGGSSGSETPGTSESATPES

SEQ ID NO: 360 - protein, 40 aa, synthetic construct
  REGION 1..40: note = synthetic polypeptide sequence
SGGSSGGSSGSETPGTSESATPESSGGSSGGSSGGSSGGS

SEQ ID NO: 361 - protein, 64 aa, synthetic construct
  REGION 1..64: note = synthetic polypeptide sequence
SGGSSGGSSGSETPGTSESATPESSGGSSGGSSGGSSGGSSGSETPGTSESATPESSGGSSGGS

SEQ ID NO: 362 - protein, 92 aa, synthetic construct
  REGION 1..92: note = synthetic polypeptide sequence
PGSPAGSPTSTEEGTSESATPESGPGTSTEPSEGSAPGSPAGSPTSTEEGTSTEPSEGSAPGTSTEPSEGSAPGTSESATPESGPGSEPATS

SEQ ID NO: 363 - protein, 5 aa, synthetic construct
  REGION 1..5: note = synthetic peptide sequence
PAPAP

SEQ ID NO: 364 - protein, 6 aa, synthetic construct
  REGION 1..6: note = synthetic peptide sequence
PAPAPA

SEQ ID NO: 365 - protein, 7 aa, synthetic construct
  REGION 1..7: note = synthetic peptide sequence
PAPAPAP

SEQ ID NO: 366 - protein, 8 aa, synthetic construct
  REGION 1..8: note = synthetic peptide sequence
PAPAPAPA

SEQ ID NO: 367 - protein, 9 aa, synthetic construct
  REGION 1..9: note = synthetic peptide sequence
PAPAPAPAP

SEQ ID NO: 368 - protein, 15 aa, synthetic construct
  REGION 1..15: note = synthetic peptide sequence
PAPAPAPAPAPAPAP

SEQ ID NO: 369 - protein, 21 aa, synthetic construct
  REGION 1..21: note = synthetic peptide sequence
PAPAPAPAPAPAPAPAPAPAP

SEQ ID NO: 370 - DNA, 306 bp, synthetic construct
  misc_feature 1..306: note = DnaE Intein-N polynucleotide sequence
  source 1..306: mol_type = other DNA
tgcctgtcatacgaaaccgagatactgacagtagaatatggccttctgccaatcgggaagattgtggagaaacggatagaatgcacagtttactctgtcgataacaatggtaacatttatactcagccagttgcccagtggcacgaccggggagagcaggaagtattcgaatactgtctggaggatggaagtctcattagggccactaaggaccacaaatttatgacagtcgatggccagatgctgcctatagacgaaatctttgagcgagagttggacctcatgcgagttgacaaccttcctaat

SEQ ID NO: 371 - protein, 102 aa, synthetic construct
  REGION 1..102: note = DnaE Intein-N polypeptide sequence
CLSYETEILTVEYGLLPIGKIVEKRIECTVYSVDNNGNIYTQPVAQWHDRGEQEVFEYCLEDGSLIRATKDHKFMTVDGQMLPIDEIFERELDLMRVDNLPN

SEQ ID NO: 372 - DNA, 108 bp, synthetic construct
  misc_feature 1..108: note = DnaE Intein-C polynucleotide sequence
  source 1..108: mol_type = other DNA
atgatcaagatagctacaaggaagtatcttggcaaacaaaacgtttatgatattggagtcgaaagagatcacaactttgctctgaagaacggattcatagcttctaat

SEQ ID NO: 373 - protein, 36 aa, synthetic construct
  REGION 1..36: note = DnaE Intein-C polypeptide sequence
MIKIATRKYLGKQNVYDIGVERDHNFALKNGFIASN

SEQ ID NO: 374 - DNA, 303 bp, synthetic construct
  misc_feature 1..303: note = Cfa-N polynucleotide sequence
  source 1..303: mol_type = other DNA
tgcctgtcttatgataccgagatacttaccgttgaatatggcttcttgcctattggaaagattgtcgaagagagaattgaatgcacagtatatactgtagacaagaatggtttcgtttacacacagcccattgctcaatggcacaatcgcggcgaacaagaagtatttgagtactgtctcgaggatggaagcatcatacgagcaactaaagatcataaattcatgaccactgacgggcagatgttgccaatagatgagatattcgagcggggcttggatctcaaacaagtggatggattgcca

SEQ ID NO: 375 - protein, 101 aa, synthetic construct
  REGION 1..101: note = Cfa-N polypeptide sequence
CLSYDTEILTVEYGFLPIGKIVEERIECTVYTVDKNGFVYTQPIAQWHNRGEQEVFEYCLEDGSIIRATKDHKFMTTDGQMLPIDEIFERGLDLKQVDGLP

SEQ ID NO: 376 - DNA, 159 bp, synthetic construct
  misc_feature 1..159: note = Cfa-C polynucleotide sequence
  source 1..159: mol_type = other DNA
atgaagaggactgccgatggatcagagtttgaatctcccaagaagaagaggaaagtaaagataatatctcgaaaaagtcttggtacccaaaatgtctatgatattggagtggagaaagatcacaacttccttctcaagaacggtctcgtagccagcaac

SEQ ID NO: 377 - protein, 53 aa, synthetic construct
  REGION 1..53: note = Cfa-C polypeptide sequence
MKRTADGSEFESPKKKRKVKIISRKSLGTQNVYDIGVEKDHNFLLKNGLVASN

SEQ ID NO: 378 - protein, 1081 aa, Neisseria meningitidis
  REGION 1..1081: note = MISC_FEATURE - Nme3Cas9; WP_002217928.1 type II CRISPR RNA-guided endonuclease Cas9 [Neisseria meningitidis]
  REGION 1..1081: note = MISC_FEATURE - NCBI Reference: WP_002217928.1; type II CRISPR RNA-guided endonuclease Cas9; Nme3Cas9 polypeptide sequence
MAAFKPNPINYILGLDIGIASVGWAMVEIDEEENPIRLIDLGVRVFERAEVPKTGDSLAMARRLARSVRRLTRRRAHRLLRARRLLKREGVLQAADFDENGLIKSLPNTPWQLRAAALDRKLTPLEWSAVLLHLIKHRGYLSQRKNEGETADKELGALLKGVADNAHALQTGDFRTPAELALNKFEKECGHIRNQRGDYSHTFSRKDLQAELNLLFEKQKEFGNPHVSGGLKEGIETLLMTQRPALSGDAVQKMLGHCTFEPAEPKAAKNTYTAERFIWLTKLNNLRILEQGSERPLTDTERATLMDEPYRKSKLTYAQARKLLSLEDTAFFKGLRYGKDNAEASTLMEMKAYHTISRALEKEGLKDKKSPLNLSPELQDEIGTAFSLFKTDEDITGRLKDRIQPEILEALLKHISFDKFVQISLKALRRIVPLMEQGKRYDEACAEIYGDHYGKKNTEEKIYLPPIPADEIRNPVVLRALSQARKVINGVVRRYGSPARIHIETAREVGKSFKDRKEIEKRQEENRKDREKAAAKFREYFPNFVGEPKSKDILKLRLYEQQHGKCLYSGKEINLGRLNEKGYVEIDHALPFSRTWDDSFNNKVLVLGSENQNKGNQTPYEYFNGKDNSREWQEFKARVETSRFPRSKKQRILLQKFDEDGFKERNLNDTRYVNRFLCQFVADRMRLTGKGKKRVFASNGQITNLLRGFWGLRKVRAENDRHHALDAVVVACSTVAMQQKITRFVRYKEMNAFDGKTIDKETGEVLHQKTHFPQPWEFFAQEVMIRVFGKPDGKPEFEEADTPEKLRTLLAEKLSSRPEAVHEYVTPLFVSRAPNRKMSGQGHMETVKSAKRLDEGVSVLRVPLTQLKLKDLEKMVNREREPKLYEALKARLEAHKDDPAKAFAEPFYKYDKAGNRTQQVKAVRVEQVQKTGVWVRNHNGIADNATMVRVDVFEKGDKYYLVPIYSWQVAKGILPDRAVVAYADEEDWTVIDESFRFKFVLYSNDLIKVQLKKDSFLGYFSGLDRATGAISLREHDLEKSKGKDGMHRIGVKTALSFQKYQIDEMGKEIRPCRLKKRPPVR

SEQ ID NO: 379 - RNA, 66 nt, synthetic construct
  misc_feature 1..66: note = Telomerase Ku Binding Motif oligonucleotide sequence
  source 1..66: mol_type = other RNA
ttcttgtcgtacttatagatcgctacgttatttcaattttgaaaatctgagtcctgggagtgcgga

SEQ ID NO: 380 - protein, 1094 aa, synthetic construct
  REGION 1..1094: note = Telomerase Ku Heterodimer polypeptide sequence
MSGWESYYKTEGDEEAEEEQEENLEASGDYKYSGRDSLIFLVDASKAMFESQSEDELTPFDMSIQCIQSVYISKIISSDRDLLAVVFYGTEKDKNSVNFKNIYVLQELDNPGAKRILELDQFKGQQGQKRFQDMMGHGSDYSLSEVLWVCANLFSDVQFKMSHKRIMLFTNEDNPHGNDSAKASRARTKAGDLRDTGIFLDLMHLKKPGGFDISLFYRDIISIAEDEDLRVHFEESSKLEDLLRKVRAKETRKRALSRLKLKLNKDIVISVGIYNLVQKALKPPPIKLYRETNEPVKTKTRTFNTSTGGLLLPSDTKRSQIYGSRQIILEKEETEELKRFDDPGLMLMGFKPLVLLKKHHYLRPSLFVYPEESLVIGSSTLFSALLIKCLEKEVAALCRYTPRRNIPPYFVALVPQEEELDDQKIQVTPPGFQLVFLPFADDKRKMPFTEKIMATPEQVGKMKAIVEKLRFTYRSDSFENPVLQQHFRNLEALALDLMEPEQAVDLTLPKVEAMNKRLGSLVDEFKELVYPPDYNPEGKVTKRKHDNEGSGSKRPKVEYSEEELKTHISKGTLGKFTVPMLKEACRAYGLKSGLKKQELLEALTKHFQDMVRSGNKAAVVLCMDVGFTMSNSIPGIESPFEQAKKVITMFVQRQVFAENKDEIALVLFGTDGTDNPLSGGDQYQNITVHRHLMLPDFDLLEDIESKIQPGSQQADFLDALIVSMDVIQHETIGKKFEKRHIEIFTDLSSRFSKSQLDIIIHSLKKCDISERHSIHWPCRLTIGSNLSIRIAAYKSILQERVKKTWTVVDAKTLKKEDIQKETVYCLNDDDETEVLKEDIIQGFRYGSDIVPFSKVDEEQMKYKSEGKCFSVLGFCKSSQVQRRFFMGNQVLKVFAARDDEAAAVALSSLIHALDDLDMVAIVRYAYDKRANPQVGVAFPHIKHNYECLVYVQLPFMEDLRQYMFSSLKNSKKYAPTEAQLNAVDALIDSMSLAKKDEKTDTLEDLFPTTKIPNPRFQRLFQCLLHRALHPREPLPPIQQHIWNMLNPPAEVTTKSQIPLSKIKTLFPLIEAKKKDQVTAQEIFQDNHEDGPTAK

SEQ ID NO: 381 - RNA, 10 nt, synthetic construct
  misc_feature 1..10: note = Telomerase Sm7 consensus site(single stranded) oligonucleotide sequence
  source 1..10: mol_type = other RNA
aatttttgga

SEQ ID NO: 382 - protein, 83 aa, synthetic construct
  REGION 1..83: note = MS2 coat protein polypeptide sequence
GSVIDVSSQRVNVQRPLDALGNSLNSPVIIKLKGDREFRGVLKSFDLHMNLVLNDAEELEDGEVTRRLGTVLIRGDNIVYISP

SEQ ID NO: 383 - RNA, 26 nt, synthetic construct
  misc_feature 1..26: note = PP7 phage operator stem loop oligonucleotide sequence
  source 1..26: mol_type = other RNA
ataaggagtttatatggaaaccctta

SEQ ID NO: 384 - protein, 128 aa, synthetic construct
  REGION 1..128: note = PP7 coat protein (PCP)polypeptide sequence
MSKTIVLSVGEATRTLTEIQSTADRQIFEEKVGPLVGRLRLTASLRQNGAKTAYRVNLKLDQADVVDCSTSVCGELPKVRYTQVWSHDVTIVANSTEASRKSLYDLTKSLVATSQVEDLVVNLVPLGR

SEQ ID NO: 385 - RNA, 19 nt, synthetic construct
  misc_feature 1..19: note = SfMu Com stem loop oligonucleotide sequence
  source 1..19: mol_type = other RNA
ctgaatgcctgcgagcatc

SEQ ID NO: 386 - protein, 62 aa, synthetic construct
  REGION 1..62: note = SfMu Com binding protein polypeptide sequence
MKSIRCKNCNKLLFKADSFDHIEIRCPRCKRHIIMLNACEHPTEKHCGKREKITHSDETVRY

SEQ ID NO: 387 - protein, 47 aa, synthetic construct
  REGION 1..47: note = leucine zipper polypeptide sequence
LEIRAAFLRQRNTALRTEVAELEQEVQRLENEVSQYETRYGPLGGGK

SEQ ID NO: 388 - protein, 47 aa, synthetic construct
  REGION 1..47: note = leucine zipper polypeptide sequence
LEIEAAFLERENTALETRVAELRQRVQRLRNRVSQYRTRYGPLGGGK

SEQ ID NO: 389 - DNA, 303 bp, synthetic construct
  source 1..303: mol_type = other DNA
tgcctgagctacgataccgagatcctgaccgtggaatacggcttcctgcctatcggcaagatcgtcgaggaacggatcgagtgcacagtgtacaccgtggataagaatggcttcgtgtacacccagcctatcgctcagtggcacaacagaggcgagcaagaggtgttcgagtactgcctggaagatggcagcatcatccgggccaccaaggaccacaagtttatgaccaccgacggccagatgctgcccatcgacgagatctttgagagaggcctggacctgaaacaggtggacggactgcct

SEQ ID NO: 390 - protein, 101 aa, synthetic construct; identical to SEQ ID NO: 375

SEQ ID NO: 391 - DNA, 264 bp, synthetic construct
  source 1..264: mol_type = other DNA
tgtctggacctcaagacccaagtgcagacacctcagggcatgaaagagattagcaatatccaggtgggcgacctggtcctgagcaacaccggctacaacgaggtgctgaacgtgttccctaagtccaagaagaaatcttataagatcaccctggaagatggcaaggaaatcatctgcagcgaggaacacctgttccccacccagaccggcgagatgaacatcagcggcggactgaaggagggcatgtgcctgtacgtgaaggag

SEQ ID NO: 392 - protein, 88 aa, synthetic construct
CLDLKTQVQTPQGMKEISNIQVGDLVLSNTGYNEVLNVFPKSKKKSYKITLEDGKEIICSEEHLFPTQTGEMNISGGLKEGMCLYVKE

SEQ ID NO: 393 - DNA, 267 bp, synthetic construct
  source 1..267: mol_type = other DNA
tgcctgagcctggacaccatggtggtgacaaacggcaaggccatcgagatcagagatgtgaaggtgggagattggctggaaagcgaatgtggcccagtgcaggttacagaggtgctgcctatcatcaagcagcctgtctttgagattgtgctgaaaagcggaaaaaagatccgggtgtccgctaatcacaagttccccaccaaggacggcctcaagaccatcaacagcggcctgaaggtgggcgacttcctgagaagcagagccaag

SEQ ID NO: 394 - protein, 89 aa, synthetic construct
CLSLDTMVVTNGKAIEIRDVKVGDWLESECGPVQVTEVLPIIKQPVFEIVLKSGKKIRVSANHKFPTKDGLKTINSGLKVGDFLRSRAK

SEQ ID NO: 395 - DNA, 303 bp, synthetic construct
  source 1..303: mol_type = other DNA
tgttttgtgcctggcaccctggtgaacacagagaatggcctgaagaaaatcgaggaaatcaaggtgggcgacaaggtgttcagccatacaggcaagctgcaggaggtggtggacaccctgatcttcgaccgggacgaggaaatcatctctatcaacggcattgattgcaccaagaaccacgagttctacgtgatcgataaggaaaacgctaatagagtgaacgaggacaacatccacctcttcgccagatgggtccacgccgaggaactggatatgaaaaagcacctgctgatcgagctggaa

SEQ ID NO: 396 - protein, 101 aa, synthetic construct
CFVPGTLVNTENGLKKIEEIKVGDKVFSHTGKLQEVVDTLIFDRDEEIISINGIDCTKNHEFYVIDKENANRVNEDNIHLFARWVHAEELDMKKHLLIELE

SEQ ID NO: 397 - DNA, 315 bp, synthetic construct
  source 1..315: mol_type = other DNA
tgcctggtgggctctagcgagattatcacaagaaactacggcaagaccaccatcaaggaagtggtcgagatcttcgacaacgacaagaatatccaggtgctggccttcaacacccacaccgataatatcgagtgggcccctatcaaggccgctcagctgaccagacctaacgccgagctggttgaactggaaatcgacaccctgcacggcgtgaaaacaatccggtgcacccctgaccaccccgtgtacaccaagaacagaggctacgtgcgggccgacgagctgacagatgatgacgagctcgtggtggctatc

SEQ ID NO: 398 - protein, 105 aa, synthetic construct
CLVGSSEIITRNYGKTTIKEVVEIFDNDKNIQVLAFNTHTDNIEWAPIKAAQLTRPNAELVELEIDTLHGVKTIRCTPDHPVYTKNRGYVRADELTDDDELVVAI

SEQ ID NO: 399 - DNA, 306 bp, synthetic construct
  source 1..306: mol_type = other DNA
tgcctgagctacgagacagagatcctgaccgtggaatatggcctgctgccaatcggaaagatcgtggaaaagcggatcgagtgcaccgtctacagcgtggacaacaacggaaatatctatacacagcctgtggcccaatggcacgaccggggcgaacaggaggtgtttgagtactgcctggaagatggttctctgattagagccaccaaggaccacaagttcatgaccgtcgacggccagatgctgcccatcgacgaaatcttcgagcgggaactcgacctgatgagagtggataacctgcccaat

SEQ ID NO: 400 - protein, 102 aa, synthetic construct; identical to SEQ ID NO: 371

SEQ ID NO: 401 - protein, 101 aa, synthetic construct; identical to SEQ ID NO: 375

SEQ ID NO: 402 - protein, 102 aa, synthetic construct; identical to SEQ ID NO: 371

SEQ ID NO: 403 - DNA, 279 bp, synthetic construct
  source 1..279: mol_type = other DNA
acaagaagcggatactgtctggacctcaagacccaagtgcagacacctcagggcatgaaagagattagcaatatccaggtgggcgacctggtcctgagcaacaccggctacaacgaggtgctgaacgtgttccctaagtccaagaagaaatcttataagatcaccctggaagatggcaaggaaatcatctgcagcgaggaacacctgttccccacccagaccggcgagatgaacatcagcggcggactgaaggagggcatgtgcctgtacgtgaaggag

SEQ ID NO: 404 - protein, 93 aa, synthetic construct
TRSGYCLDLKTQVQTPQGMKEISNIQVGDLVLSNTGYNEVLNVFPKSKKKSYKITLEDGKEIICSEEHLFPTQTGEMNISGGLKEGMCLYVKE

SEQ ID NO: 405 - DNA, 282 bp, synthetic construct
  source 1..282: mol_type = other DNA
tctcagctgaaccggtgcctgagcctggacaccatggtggtgacaaacggcaaggccatcgagatcagagatgtgaaggtgggagattggctggaaagcgaatgtggcccagtgcaggttacagaggtgctgcctatcatcaagcagcctgtctttgagattgtgctgaaaagcggaaaaaagatccgggtgtccgctaatcacaagttccccaccaaggacggcctcaagaccatcaacagcggcctgaaggtgggcgacttcctgagaagcagagccaag

SEQ ID NO: 406 - protein, 94 aa, synthetic construct
SQLNRCLSLDTMVVTNGKAIEIRDVKVGDWLESECGPVQVTEVLPIIKQPVFEIVLKSGKKIRVSANHKFPTKDGLKTINSGLKVGDFLRSRAK

SEQ ID NO: 407 - DNA, 318 bp, synthetic construct
  source 1..318: mol_type = other DNA
ggcatcggcggaggatgttttgtgcctggcaccctggtgaacacagagaatggcctgaagaaaatcgaggaaatcaaggtgggcgacaaggtgttcagccatacaggcaagctgcaggaggtggtggacaccctgatcttcgaccgggacgaggaaatcatctctatcaacggcattgattgcaccaagaaccacgagttctacgtgatcgataaggaaaacgctaatagagtgaacgaggacaacatccacctcttcgccagatgggtccacgccgaggaactggatatgaaaaagcacctgctgatcgagctggaa

SEQ ID NO: 408 - protein, 106 aa, synthetic construct
GIGGGCFVPGTLVNTENGLKKIEEIKVGDKVFSHTGKLQEVVDTLIFDRDEEIISINGIDCTKNHEFYVIDKENANRVNEDNIHLFARWVHAEELDMKKHLLIELE

SEQ ID NO: 409 - DNA, 330 bp, synthetic construct
  source 1..330: mol_type = other DNA
ggaacaaacccatgttgcctggtgggctctagcgagattatcacaagaaactacggcaagaccaccatcaaggaagtggtcgagatcttcgacaacgacaagaatatccaggtgctggccttcaacacccacaccgataatatcgagtgggcccctatcaaggccgctcagctgaccagacctaacgccgagctggttgaactggaaatcgacaccctgcacggcgtgaaaacaatccggtgcacccctgaccaccccgtgtacaccaagaacagaggctacgtgcgggccgacgagctgacagatgatgacgagctcgtggtggctatc

SEQ ID NO: 410 - protein, 110 aa, synthetic construct
GTNPCCLVGSSEIITRNYGKTTIKEVVEIFDNDKNIQVLAFNTHTDNIEWAPIKAAQLTRPNAELVELEIDTLHGVKTIRCTPDHPVYTKNRGYVRADELTDDDELVVAI

SEQ ID NO: 411 - DNA, 105 bp, synthetic construct
  source 1..105: mol_type = other DNA
gtcaagatcatcagcagaaagagcctgggcacccagaacgtgtacgatatcggagtgggcgagccccacaactttctgctcaagaatggcctggtggccagcaac

SEQ ID NO: 412 - protein, 35 aa, synthetic construct
VKIISRKSLGTQNVYDIGVGEPHNFLLKNGLVASN

SEQ ID NO: 413 - DNA, 114 bp, synthetic construct
  source 1..114: mol_type = other DNA
atgatgctgaaaaagatcctgaagatcgaggaactggatgagagagagctgatcgacatcgaagtgtctggcaatcacctgttctacgccaacgacatcctgacccacaacagc

SEQ ID NO: 414 - protein, 38 aa, synthetic construct
MMLKKILKIEELDERELIDIEVSGNHLFYANDILTHNS

SEQ ID NO: 415 - DNA, 138 bp, synthetic construct
  source 1..138: mol_type = other DNA
atgtgcgaaatcttcgagaacgagattgattgggacgaaatcgcctctatcgagtacgtgggcgtggaagagacaatcgacatcaacgtgaccaacgacagactgtttttcgccaatggcatcctgacccacaacagc

SEQ ID NO: 416 - protein, 46 aa, synthetic construct
MCEIFENEIDWDEIASIEYVGVEETIDINVTNDRLFFANGILTHNS

SEQ ID NO: 417 - DNA, 123 bp, synthetic construct
  source 1..123: mol_type = other DNA
atgaaattcaagctgaaggaaatcaccagcatcgagacaaagcactacaagggcaaggtgcacgatctgaccgtgaaccaggaccacagctacaacgtcagaggcaccgtggtgcataattct

SEQ ID NO: 418 - protein, 41 aa, synthetic construct
MKFKLKEITSIETKHYKGKVHDLTVNQDHSYNVRGTVVHNS

SEQ ID NO: 419 - DNA, 123 bp, synthetic construct
  source 1..123: mol_type = other DNA
atggaagccaagacctacatcggcaagctgaaatctagaaagatcgtgtccaacgaggatacatacgacatccagaccagcacccacaatttcttcgccaacgacatcctggtgcacaacagc

SEQ ID NO: 420 - protein, 41 aa, synthetic construct
MEAKTYIGKLKSRKIVSNEDTYDIQTSTHNFFANDILVHNS

SEQ ID NO: 421 - DNA, 108 bp, synthetic construct
  source 1..108: mol_type = other DNA
atgatcaagatcgccacaagaaagtacctgggcaagcagaacgtgtacgacatcggcgtggagagagaccacaacttcgccctgaagaacggctttatcgcctctaat

SEQ ID NO: 422 - protein, 36 aa, synthetic construct; identical to SEQ ID NO: 373

SEQ ID NO: 423 - protein, 36 aa, synthetic construct
MVKIISRKSLGTQNVYDIGVGEPHNFLLKNGLVASN

SEQ ID NO: 424 - protein, 35 aa, synthetic construct
IKIATRKYLGKQNVYDIGVERDHNFALKNGFIASN

SEQ ID NO: 425 - DNA, 88 bp, synthetic construct
  source 1..88: mol_type = other DNA; note = SaCas9 scaffold sequence
gttttagtactctgtaatgaaaattacagaatctactaaaacaaggcaaaatgccgtgtttatctcgtcaacttgttggcgagatttt

SEQ ID NO: 426 - protein, 764 aa, Homo sapiens
MGSNLSPQLCLMPFILGLLSGGVTTTPWSLAQPQGSCSLEGVEIKGGSFRLLQEGQALEYVCPSGFYPYPVQTRTCRSTGSWSTLKTQDQKTVRKAECRAIHCPRPHDFENGEYWPRSPYYNVSDEISFHCYDGYTLRGSANRTCQVNGRWSGQTAICDNGAGYCSNPGIPIGTRKVGSQYRLEDSVTYHCSRGLTLRGSQRRTCQEGGSWSGTEPSCQDSFMYDTPQEVAEAFLSSLTETIEGVDAEDGHGPGEQQKRKIVLDPSGSMNIYLVLDGSDSIGASNFTGAKKCLVNLIEKVASYGVKPRYGLVTYATYPKIWVKVSEADSSNADWVTKQLNEINYEDHKLKSGTNTKKALQAVYSMMSWPDDVPPEGWNRTRHVIILMTDGLHNMGGDPITVIDEIRDLLYIGKDRKNPREDYLDVYVFGVGPLVNQVNINALASKKDNEQHVFKVKDMENLEDVFYQMIDESQSLSLCGMVWEHRKGTDYHKQPWQAKISVIRPSKGHESCMGAVVSEYFVLTAAHCFTVDDKEHSIKVSVGGEKRDLEIEVVLFHPNYNINGKKEAGIPEFYDYDVALIKLKNKLKYGQTIRPICLPCTEGTTRALRLPPTTTCQQQKEELLPAQDIKALFVSEEEKKLTRKEVYIKNGDKKGSCERDAQYAPGYDKVKDISEVVTPRFLCTGGVSPYADPNTCRGDSGGPLIVHKRSRFIQVGVISWGVVDVCKNQKRQKQVPAHARDFHINLFQVLPWLKEKLQDEDLGFL

SEQ ID NO: 427 - RNA, 2295 nt, Homo sapiens
  source 1..2295: mol_type = genomic RNA
atggggagcaatctcagcccccaactctgcctgatgccctttatcttgggcctcttgtctggaggtgtgaccaccactccatggtctttggcccagccccagggatcctgctctctggagggggtagagatcaaaggcggctccttccgacttctccaagagggccaggcactggagtacgtgtgtccttctggcttctacccgtaccctgtgcagacacgtacctgcagatctacggggtcctggagcaccctgaagactcaagaccaaaagactgtcaggaaggcagagtgcagagcaatccactgtccaagaccacacgacttcgagaacggggaatactggccccggtctccctactacaatgtgagtgatgagatctctttccactgctatgacggttacactctccggggctctgccaatcgcacctgccaagtgaatggccggtggagtgggcagacagcgatctgtgacaacggagcggggtactgctccaacccgggcatccccattggcacaaggaaggtgggcagccagtaccgccttgaagacagcgtcacctaccactgcagccgggggcttaccctgcgtggctcccagcggcgaacgtgtcaggaaggtggctcttggagcgggacggagccttcctgccaagactccttcatgtacgacacccctcaagaggtggccgaagctttcctgtcttccctgacagagaccatagaaggagtcgatgctgaggatgggcacggcccaggggaacaacagaagcggaagatcgtcctggacccttcaggctccatgaacatctacctggtgctagatggatcagacagcattggggccagcaacttcacaggagccaaaaagtgtctagtcaacttaattgagaaggtggcaagttatggtgtgaagccaagatatggtctagtgacatatgccacataccccaaaatttgggtcaaagtgtctgaagcagacagcagtaatgcagactgggtcacgaagcagctcaatgaaatcaattatgaagaccacaagttgaagtcagggactaacaccaagaaggccctccaggcagtgtacagcatgatgagctggccagatgacgtccctcctgaaggctggaaccgcacccgccatgtcatcatcctcatgactgatggattgcacaacatgggcggggacccaattactgtcattgatgagatccgggacttgctatacattggcaaggatcgcaaaaacccaagggaggattatctggatgtctatgtgtttggggtcgggcctttggtgaaccaagtgaacatcaatgctttggcttccaagaaagacaatgagcaacatgtgttcaaagtcaaggatatggaaaacctggaagatgttttctaccaaatgatcgatgaaagccagtctctgagtctctgtggcatggtttgggaacacaggaagggtaccgattaccacaagcaaccatggcaggccaagatctcagtcattcgcccttcaaagggacacgagagctgtatgggggctgtggtgtctgagtactttgtgctgacagcagcacattgtttcactgtggatgacaaggaacactcaatcaaggtcagcgtaggaggggagaagcgggacctggagatagaagtagtcctatttcaccccaactacaacattaatgggaaaaaagaagcaggaattcctgaattttatgactatgacgttgccctgatcaagctcaagaataagctgaaatatggccagactatcaggcccatttgtctcccctgcaccgagggaacaactcgagctttgaggcttcctccaactaccacttgccagcaacaaaaggaagagctgctccctgcacaggatatcaaagctctgtttgtgtctgaggaggagaaaaagctgactcggaaggaggtctacatcaagaatggggataagaaaggcagctgtgagagagatgctcaatatgccccaggctatgacaaagtcaaggacatctcagaggtggtcacccctcggttcctttgtactggaggagtgagtccctatgctgaccccaatacttgcagaggtgattctggcggccccttgatagttcacaagagaagtcgtttcattcaagttggtgtaatcagctggggagtagtggatgtctgcaaaaaccagaagcggcaaaagcaggtacctgctcacgcccgagactttcacatcaacctctttcaagtgctgccctggctgaaggagaaactccaagatgaggatttgggttttctataa

SEQ ID NO: 428 - DNA, 7637 bp, Homo sapiens
  source 1..7637: mol_type = genomic DNA
aggacccaggggttacaggatctcagccttgttggggggatgagggaggcctttgagggatctagggaggttggggcttacagttggggctgtggcagcctcccagccagttctctccttttctccaggtgggtctggtgagctggggtctttacaacccctgccttggctctgctgacaaaaactcccgcaaaagggcccctcgtagcaaggtcccgccgccacgagactttcacatcaatctcttccgcatgcagccctggctgaggcagcacctgggggatgtcctgaattttttacccctctagccatggccactgagccctctgctgccctgccagaatctgccgcccctccatcttctacctctgaatggccacccttagaccctgtgatccatcctctctcctagctgagtaaatccgggtctctaggatgccagaggcagcgcacacaagctgggaaatcctcagggctcctaccagcaggactgcctcgctgccccacctcccgctccttggcctgtccccagattccttccctggttgacttgactcatgcttgtttcactttcacatggaatttcccagttatgaaattaataaaaatcaatggtttccacatctctcagtgcctctatctggaggccaggtagggctggccttgggggagggggaggccagaatgactccaagagctacaggaaggcaggtcagagaccccactggacaaacagtggctggactctgcaccataacacacaatcaacaggggagtgagctggatccttatttctggtccctaagtgggtggtttgggcttactggggaggagctaaggccggagaggaggtactgaaggggagagtcctggacctttggcagcaaagggtgggacttctgcagtttctgtttccttgactggcagctcagcggggccctcccgcttggatgttccgggaaagtgatgtgggtaggacaggcggggcgagccgcaggtgccagaacacagattgtataaaaggctgggggctggtggggagcaggggaagggaatgtgaccaggtctaggtctggagtttcagcttggacactgagccaagcagacaagcaaagcaagccaggacacaccatcctgccccaggcccagcttctctcctgccttccaacgccatggggagcaatctcagcccccaactctgcctgatgccctttatcttgggcctcttgtctggaggtaagcgagggtaaccttcccttcctgctgtctccagcatccctccttggccttttggggccaggcttcatcagcctttctcttcaggtgtgaccaccactccatggtctttggcccggccccagggatcctgctctctggagggggtagagatcaaaggcggctccttccgacttctccaagagggccaggcactggagtacgtgtgtccttctggcttctacccgtaccctgtgcagacacgtacctgcagatctacggggtcctggagcaccctgaagactcaagaccaaaagactgtcaggaaggcagagtgcagaggtttgagggcaatgagtgtgggcagtggcctaaggcagaaacagggcaggcggcagcaaggtcaggactaggatgagactaggcagggtgacaaggtgggctgaccgggagtaggagcagttttagggtggcaggcggaaagggggcaagaaaaagcggagttaacccttactaagcatttaccctgggcttccaggcagccctggaagtcaagagaacactcagaaatggggagggagaagcagtggaaatccatatgggttgaggagtaggtaagatgctgcttctgcgggactgggaatgcgctgtttctcagtgacatggtctccgagaccaggagggatacacctaaggcagcctttccctcttgatgacttctacttgtccccccttctcaaagcaatccactgtccaagaccacacgacttcgagaacggggaatactggccccggtctccctactacaatgtgagtgatgagatctctttccactgctatgacggttacactctccggggctctgccaatcgcacctgccaagtgaatggccgatggagtgggcagacagcgatctgtgacaacggaggtgagaagcatcccctccccctacattgctgtctccctgacggcgcccagcccgaggagtgggcactcggctccggacactgtaactcttgctctctaccttgctcacggggcctcaggcttcagtgcttacctcgatgtctcatacctctgcagcggggtactgctccaacccgggcatccccattggcacaaggaaggtgggcagccagtaccgccttgaagacagcgtcacctaccactgcagccgggggcttaccctgcgtggctcccagcggcgaacgtgtcaggaaggtggctcttggagcgggacggagccttcctgccaaggtgacctttgacctgtacccccaggtcagatcctggtcttccatcctactgtcttctctccccacctcaaccctgctctttcctcactttgtttaaacctccctgtacaactatctcacttctgagccttttataccctggaaacccatgatcccccgtctctttggtcactgtatccctgacactcccagacatttgacctcatttctgactctcccagactccttcatgtacgacacccctcaagaggtggccgaagctttcctgtcttccctgacagagaccatagaaggagtcgatgctgaggatgggcacggcccaggtttgaagacagagaagggaggcagggcagggaactgggggaaaatggagaagggacagaactgttaatgctggagcctgagccactctcctggcacccaggggaacaacagaagcggaagatcgtcctggacccttcaggctccatgaacatctacctggtgctagatggatcagacagcattggggccagcaacttcacaggagccaaaaagtgtctagtcaacttaattgagaaggtggaatcctcctatccctgaactcgggggaatggaatctcgctgatcttccaggactagctccctgatcattccagcccctctgaacaacagggccccaggaaaatctccaggtcctattctgtcctccttcccttttacttgaagcagtttcttgactggtaattcctccatgaacctcagcccttgagcctcttactgagagcctccctgtcccagcaaagtcgctgaaatctcccaatcacagtattctattttcaatgccatggcgccttgttctcctcacccacaggtggcaagttatggtgtgaagccaagatatggtctagtgacatatgccacataccccaaaatttgggtcaaagtgtctgaagcagacagcagtaatgcagactgggtcacgaagcagctcaatgaaatcaattatgaaggtcagaggttagggaatggtgggaggttcactttggggtcaggaggttcagggtggagggggtcatgagactaccttgagggcgacagggaggaccactttgtagtcaaaagttgaacagcaggatcgttgggcaatggaggttagtgggaacctgttgggggctggaagggccactttgtggtcaaagggaagtccgtgtaatgatgattaacttaaaaagttgaaagatgtgggatttcagttgcagattggtctctggggttaaaagatggcttggaagaccaggtgaggtgatggtctcttccctctccacagaccacaagttgaagtcagggactaacaccaagaaggccctccaggcagtgtacagcatgatgagctggccagatgacgtccctcctgaaggctggaaccgcacccgccatgtcatcatcctcatgactgatggtcagaagggacctctctcctgtcccagcctccccaccttctcagaccagcatgtggcccttaagtccacttgtaacactatacccatggttggggccctgaatgtgactcatagctggctgttcatctctcctgtgacccttcataaggaattcttcctaagccctgtgatcaactatctctaacccttcctcaacttgctcaccctgccatgtgtatccctgcctttagccagtttatcttccttatctcctaccctcatggtcctgtctcttctgcaggattgcacaacatgggcggggacccaattactgtcattgatgagatccgggacttgctatacattggcaaggatcgcaaaaacccaagggaggattatctgggtgagtaacctgcctaggacccagcaccccacttcctcagggcttggaccctcatccttcctttttatccctcagatgtctatgtgtttggggtcgggcctttggtgaaccaagtgaacatcaatgctttggcttccaagaaagacaatgagcaacatgtgttcaaagtcaaggatatggaaaacctggaagatgttttctaccaaatgatcggtagggagatacaagggaataaagaacacaactctcctcaggttcccctgaagtaattcattcttcctctacacctgaagctctagttgcctggaaagccttcttcattcctccttctctacctcagtgtcactattcttgtttcctggcactgttcacttaaccttagaatcacagagctctgagcacttcagagatctttctatagtcctacatttgacacgtggaaacagaagccaaaggaggtcaagggacagcaagttagcaacaagggtgggcttgaaaacagccaggcctctgacagcttgatcccaagttctttcccttttcagtccaccatagcagttttctcctaacacgaggaaacaaatacccgtggtctttccctttctccttttgggcctttgctccccatagactcctacccaaaaggctgctgccatttgggaatgaagtgttccgagttttcagcacattctccttctctgccagatgaaagccagtctctgagtctctgtggcatggtttgggaacacaggaagggtaccgattaccacaagcaaccatggcaggccaagatctcagtcattgtaagcacagaatcccagtagtggggacttgggggaggtgaggtcaaggtgaaatgggagtaggggaaggaaaaaatggccataagagatggtggtttgtgaaagttgagctttccctctctactgttgtgtccccagcgcccttcaaagggacacgagagctgtatgggggctgtggtgtctgagtactttgtgctgacagcagcacattgtttcactgtggatgacaaggaacactcaatcaaggtcagcgtaggtaaggatgcaactgaaggtcctgggctgcacctatgctctccaggcaacacctcccactttctacagatcctacactccacccatcctcaatgcagccccattccttgcaccccagaccagtcagggatgggggaagacgtgaagttaggaatgacacggggccagaggcaggaagctgcccacaaagaggtggtacctactctcctacttcaggaggggagaagcgggacctggagatagaagtagtcctatttcaccccaactacaacattaatgggaaaaaagaagcaggaattcctgaattttatgactatgacgttgccctgatcaagctcaagaataagctgaaatatggccagactatcaggtgagagcgtccagatccctgaggaaaggctgggaaaggctggaggactggggtgaggagcaggcctggtttgctgttctccttgtcctttataggcccatttgtctcccctgcaccgagggaacaactcgagctttgaggcttcctccaactaccacttgccagcaacaaagtaagacatacttggcaagaggataaggatgagatcccaagagacaagtggggcatgagagggaggtgcaataggaagagatgatgcctggcccagaacctagctctagaagggcttaggggacatctactgagtgacaaaggcaatggggagatgacagtggtgggagcagctgaagtgacgcagtctattcgtccagaggaagagctgctccctgcacaggatatcaaagctctgtttgtgtctgaggaggagaaaaagctgactcggaaggaggtctacatcaagaatggggataaggtgagaaacgggcatcctaaggaggcactctaggccccaatccttcctaagccacttctgttcattacttctccatgcttcccacctcccctacagaaaggcagctgtgagagagatgctcaatatgccccaggctatgacaaagtcaaggacatctcagaggtggtcacccctcggttcctttgtactggaggagtgagtccctatgctgaccccaatacttgcagaggtgagagaatgctctttggttgtgctacaagtgcccaaggcccaacagtccttttctctacagcttctcctctccttgcaggtgattctggcggccccttgatagttcacaagagaagtcgtttcattcaagtgagtcctccctttcctatctggggagatgccaagtggtcagcatgggccccaaagcaggaaagctcaatgcatgtggctagtaattcgaggtaggcagagcctgcctcaccttaggaccgcatgtcttgcctgcgtgtgtcaagaacgaggctgagctgggtccctagtctgattcctttaggtcagctaagacacaagcaggaacagccatgcttccaggattaggaattctactgaatgatccatggcaccccactgcctctgcaggttggtgtaatcagctggggagtagtggatgtctgcaaaaaccagaagcggcaaaagcaggtacctgctcacgcccgagactttcacatcaacctctttcaagtgctgccctggctgaaggagaaactccaagatgaggatttgggttttctataaggggtttcctgctggacaggggcgtgggattgaattaaaacagctgcgacaacacctgtgttccagatccttttggggcaagggagtggggaacaggcactggccatgttgttacactgagatcaaacctgacagccgtttttaaaggtttaaccccaatcccaagtgctgaaaaaccagaggctgagggagatgtgtaagcttccacctcagtgttttactgagaccagcattggggcatatgaggcacaaggaatccagctctgttccctagaagccatccacaaggttttccttgtagacgtcatcactgtagacaatctgggtcctcttgtcccggtggcaacccttagggctgttctggacagctagggagggaggagaggaacagttaaggtctaaaggagatcatagaacagaccctgaggctgactcctgaccacctcactcctggccactggcccctggaagcccagtttccacgctgccctctggtggccaggatggcctgtcttccttagctcctttgtgccaacccatggccaagaaaagtataagtggacattttgatgaatgttttgttcttagaaaaatcccaaatgtcattgttgagacacgtgaatgatattaacccactacttacagtcagtatgtca

SEQ ID NO: 429 - DNA, 23 bp, Homo sapiens
  source 1..23: mol_type = genomic DNA
gcttacaatgactgagatcttgg

SEQ ID NO: 430 - DNA, 23 bp, Macaca fascicularis
  source 1..23: mol_type = genomic DNA
gcttacagtgactgagatcttgg

SEQ ID NO: 431 - DNA, 116 bp, Homo sapiens
  source 1..116: mol_type = genomic DNA
catggcaggccaagatctcagtcattgtaagcacagaatcccatatggaaggtcattagctccggcaagcaatcatggcaggccaagatctcagtcactgtaagcacagaatccca

SEQ ID NO: 432 - protein, 9 aa, Homo sapiens
HGRPRSQSL

SEQ ID NO: 433 - protein, 28 aa, Homo sapiens
AQNPIWKVISSGKQSWQAKISVTVSTES

SEQ ID NO: 434 - DNA, 23 bp, Homo sapiens
  source 1..23: mol_type = genomic DNA
tgctccccatggcgttggaaggc

SEQ ID NO: 435 - DNA, 23 bp, Macaca fascicularis
  source 1..23: mol_type = genomic DNA
tgctccccatggcattagaaggc

SEQ ID NO: 436 - DNA, 23 bp, Homo sapiens
  source 1..23: mol_type = genomic DNA
ttgctccccatggcgttggaagg

SEQ ID NO: 437 - DNA, 23 bp, Macaca fascicularis
  source 1..23: mol_type = genomic DNA
ctgctccccatggcattagaagg

SEQ ID NO: 438 - DNA, 23 bp, Homo sapiens
  source 1..23: mol_type = genomic DNA
ccccatggcgttggaaggcagga

SEQ ID NO: 439 - DNA, 23 bp, Macaca fascicularis
  source 1..23: mol_type = genomic DNA
ccccatggcattagaaggcagga

SEQ ID NO: 440 - RNA, 100 nt, synthetic construct
  source 1..100: mol_type = other RNA
nnnnnnnnnnnnnnnnnnnngttttagagctagaaatagcaagttaaaataaggctagtccgttatcaacttgaaaaagtggcaccgagtcggtgctttt

SEQ ID NO: 441 - RNA, 109 nt, synthetic construct
  source 1..109: mol_type = other RNA
nnnnnnnnnnnnnnnnnnnnngttttagtactctgtaatgaaaattacagaatctactaaaacaaggcaaaatgccgtgtttatctcgtcaacttgttggcgagatttt

SEQ ID NO: 442 - skipped

SEQ ID NO: 443 - protein, 19 aa, synthetic construct
CKRTADGSEFESPKKKRKV

SEQ ID NO: 444 - RNA, 106 nt, synthetic construct
  source 1..106: mol_type = other RNA
nnnnnnnnnnnnnnnnnnnngttttagagccggcggaaacgccggcaagttaaaataaggctagtccgttatcaacttgaaaaagtggcaccgagtcggtgctttt

SEQ ID NO: 445 - RNA, 106 nt, synthetic construct; identical to SEQ ID NO: 444
  source 1..106: mol_type = other RNA

SEQ ID NO: 446 - protein, 19 aa, synthetic construct
CKRTADGSEFESPKKKRKV

SEQ ID NO: 447 - RNA, 114 nt, synthetic construct
  source 1..114: mol_type = other RNA
nnnnnnnnnnnnnnnnnnnngttttagagccggcggaaacgccggcaagttaaaataaggctagtccgttatcaacttggacttcggtccaagtggcaccgagtcggtgctttt

SEQ ID NO: 448 - RNA, 99 nt, synthetic construct
  source 1..99: mol_type = other RNA
ctcagatgtctatgtgtttgttttagagctagaaatagcaagttaaaataaggctagtccgttatcaacttgaaaaagtggcaccgagtcggtgctttt

SEQ ID NO: 449 - RNA, 100 nt, synthetic construct
  source 1..100: mol_type = other RNA
cctcagatgtctatgtgtttgttttagagctagaaatagcaagttaaaataaggctagtccgttatcaacttgaaaaagtggcaccgagtcggtgctttt

SEQ ID NO: 450 - RNA, 101 nt, synthetic construct
  source 1..101: mol_type = other RNA
ccctcagatgtctatgtgtttgttttagagctagaaatagcaagttaaaataaggctagtccgttatcaacttgaaaaagtggcaccgagtcggtgctttt

SEQ ID NO: 451 - RNA, 102 nt, synthetic construct
  source 1..102: mol_type = other RNA
tccctcagatgtctatgtgtttgttttagagctagaaatagcaagttaaaataaggctagtccgttatcaacttgaaaaagtggcaccgagtcggtgctttt

SEQ ID NO: 452 - RNA, 103 nt, synthetic construct
  source 1..103: mol_type = other RNA
atccctcagatgtctatgtgtttgttttagagctagaaatagcaagttaaaataaggctagtccgttatcaacttgaaaaagtggcaccgagtcggtgctttt

SEQ ID NO: 453 - RNA, 99 nt, synthetic construct
  source 1..99: mol_type = other RNA
ctcacctctgcaagtattggttttagagctagaaatagcaagttaaaataaggctagtccgttatcaacttgaaaaagtggcaccgagtcggtgctttt

SEQ ID NO: 454 - RNA, 100 nt, synthetic construct
  source 1..100: mol_type = other RNA
tctcacctctgcaagtattggttttagagctagaaatagcaagttaaaataaggctagtccgttatcaacttgaaaaagtggcaccgagtcggtgctttt

SEQ ID NO: 455 - RNA, 101 nt, synthetic construct
  source 1..101: mol_type = other RNA
ctctcacctctgcaagtattggttttagagctagaaatagcaagttaaaataaggctagtccgttatcaacttgaaaaagtggcaccgagtcggtgctttt

SEQ ID NO: 456 - RNA, 102 nt, synthetic construct
  source 1..102: mol_type = other RNA
tctctcacctctgcaagtattggttttagagctagaaatagcaagttaaaataaggctagtccgttatcaacttgaaaaagtggcaccgagtcggtgctttt

SEQ ID NO: 457 - RNA, 103 nt, synthetic construct
  source 1..103: mol_type = other RNA
ttctctcacctctgcaagtattggttttagagctagaaatagcaagttaaaataaggctagtccgttatcaacttgaaaaagtggcaccgagtcggtgctttt

SEQ ID NO: 458 - RNA, 99 nt, synthetic construct
  source 1..99: mol_type = other RNA
cttacaatgactgagatctgttttagagctagaaatagcaagttaaaataaggctagtccgttatcaacttgaaaaagtggcaccgagtcggtgctttt

SEQ ID NO: 459 - RNA, 100 nt, synthetic construct
  source 1..100: mol_type = other RNA
gcttacaatgactgagatctgttttagagctagaaatagcaagttaaaataaggctagtccgttatcaacttgaaaaagtggcaccgagtcggtgctttt

SEQ ID NO: 460 - RNA, 101 nt, synthetic construct
  source 1..101: mol_type = other RNA
tgcttacaatgactgagatctgttttagagctagaaatagcaagttaaaataaggctagtccgttatcaacttgaaaaagtggcaccgagtcggtgctttt

SEQ ID NO: 461 - RNA, 102 nt, synthetic construct
  source 1..102: mol_type = other RNA
gtgcttacaatgactgagatctgttttagagctagaaatagcaagttaaaataaggctagtccgttatcaacttgaaaaagtggcaccgagtcggtgctttt

SEQ ID NO: 462 - RNA, 103 nt, synthetic construct
  source 1..103: mol_type = other RNA
tgtgcttacaatgactgagatctgttttagagctagaaatagcaagttaaaataaggctagtccgttatcaacttgaaaaagtggcaccgagtcggtgctttt

SEQ ID NO: 463 - RNA, 99 nt, synthetic construct
  source 1..99: mol_type = other RNA
cttacagtgactgagatctgttttagagctagaaatagcaagttaaaataaggctagtccgttatcaacttgaaaaagtggcaccgagtcggtgctttt

SEQ ID NO: 464 - RNA, 100 nt, synthetic construct
  source 1..100: mol_type = other RNA
gcttacagtgactgagatctgttttagagctagaaatagcaagttaaaataaggctagtccgttatcaacttgaaaaagtggcaccgagtcggtgctttt

SEQ ID NO: 465 - RNA, 101 nt, synthetic construct
  source 1..101: mol_type = other RNA
tgcttacagtgactgagatctgttttagagctagaaatagcaagttaaaataaggctagtccgttatcaacttgaaaaagtggcaccgagtcggtgctttt

SEQ ID NO: 466 - RNA, 102 nt, synthetic construct
  source 1..102: mol_type = other RNA
gtgcttacagtgactgagatctgttttagagctagaaatagcaagttaaaataaggctagtccgttatcaacttgaaaaagtggcaccgagtcggtgctttt

SEQ ID NO: 467 - RNA, 103 nt, synthetic construct
  source 1..103: mol_type = other RNA
tgtgcttacagtgactgagatctgttttagagctagaaatagcaagttaaaataaggctagtccgttatcaacttgaaaaagtggcaccgagtcggtgctttt

SEQ ID NO: 468-567 - skipped (100 entries)

SEQ ID NO: 568 - RNA, 100 nt, synthetic construct
  source 1..100: mol_type = other RNA
ctgcaggattgcacaacatggttttagagctagaaatagcaagttaaaataaggctagtccgttatcaacttgaaaaagtggcaccgagtcggtgctttt

SEQ ID NO: 569 - RNA, 100 nt, synthetic construct
  source 1..100: mol_type = other RNA
ataggcccatttgtctccccgttttagagctagaaatagcaagttaaaataaggctagtccgttatcaacttgaaaaagtggcaccgagtcggtgctttt

SEQ ID NO: 570 - RNA, 100 nt, synthetic construct
  source 1..100: mol_type = other RNA
ctctgcaggttggtgtaatcgttttagagctagaaatagcaagttaaaataaggctagtccgttatcaacttgaaaaagtggcaccgagtcggtgctttt

SEQ ID NO: 571 - RNA, 100 nt, synthetic construct
  source 1..100: mol_type = other RNA
acgctctcacctgatagtctgttttagagctagaaatagcaagttaaaataaggctagtccgttatcaacttgaaaaagtggcaccgagtcggtgctttt

SEQ ID NO: 572 - RNA, 100 nt, synthetic construct
  source 1..100: mol_type = other RNA
cttacaatgactgagatcttgttttagagctagaaatagcaagttaaaataaggctagtccgttatcaacttgaaaaagtggcaccgagtcggtgctttt

SEQ ID NO: 573 - RNA, 100 nt, synthetic construct
  source 1..100: mol_type = other RNA
tcacctccgttgtcacagatgttttagagctagaaatagcaagttaaaataaggctagtccgttatcaacttgaaaaagtggcaccgagtcggtgctttt

SEQ ID NO: 574 - RNA, 100 nt, synthetic construct
  source 1..100: mol_type = other RNA
tcgcttacctccagacaagagttttagagctagaaatagcaagttaaaataaggctagtccgttatcaacttgaaaaagtggcaccgagtcggtgctttt

SEQ ID NO: 575 - RNA, 100 nt, synthetic construct
  source 1..100: mol_type = other RNA
cacccacaggtggcaagttagttttagagctagaaatagcaagttaaaataaggctagtccgttatcaacttgaaaaagtggcaccgagtcggtgctttt

SEQ ID NO: 576 - RNA, 100 nt, synthetic construct
  source 1..100: mol_type = other RNA
acagaccacaagttgaagtcgttttagagctagaaatagcaagttaaaataaggctagtccgttatcaacttgaaaaagtggcaccgagtcggtgctttt

SEQ ID NO: 577 - RNA, 100 nt, synthetic construct
  source 1..100: mol_type = other RNA
tctgcaggattgcacaacatgttttagagctagaaatagcaagttaaaataaggctagtccgttatcaacttgaaaaagtggcaccgagtcggtgctttt

SEQ ID NO: 578 - RNA, 100 nt, synthetic construct
  source 1..100: mol_type = other RNA
gcaggattgcacaacatggggttttagagctagaaatagcaagttaaaataaggctagtccgttatcaacttgaaaaagtggcaccgagtcggtgctttt

SEQ ID NO: 579 - RNA, 100 nt, synthetic construct
  source 1..100: mol_type = other RNA
ccctcagatgtctatgtgttgttttagagctagaaatagcaagttaaaataaggctagtccgttatcaacttgaaaaagtggcaccgagtcggtgctttt

SEQ ID NO: 580 - RNA, 100 nt, synthetic construct; identical to SEQ ID NO: 449
  source 1..100: mol_type = other RNA

SEQ ID NO: 581 - RNA, 100 nt, synthetic construct
  source 1..100: mol_type = other RNA
ctcagatgtctatgtgtttggttttagagctagaaatagcaagttaaaataaggctagtccgttatcaacttgaaaaagtggcaccgagtcggtgctttt

SEQ ID NO: 582 - RNA, 100 nt, synthetic construct
  source 1..100: mol_type = other RNA
gtgtccccagcgcccttcaagttttagagctagaaatagcaagttaaaataaggctagtccgttatcaacttgaaaaagtggcaccgagtcggtgctttt

SEQ ID NO: 583 - RNA, 100 nt, synthetic construct
  source 1..100: mol_type = other RNA
tgtccccagcgcccttcaaagttttagagctagaaatagcaagttaaaataaggctagtccgttatcaacttgaaaaagtggcaccgagtcggtgctttt

SEQ ID NO: 584 - RNA, 100 nt, synthetic construct
  source 1..100: mol_type = other RNA
ctacttcaggaggggagaaggttttagagctagaaatagcaagttaaaataaggctagtccgttatcaacttgaaaaagtggcaccgagtcggtgctttt

SEQ ID NO: 585 - RNA, 100 nt, synthetic construct
  source 1..100: mol_type = other RNA
tacttcaggaggggagaagcgttttagagctagaaatagcaagttaaaataaggctagtccgttatcaacttgaaaaagtggcaccgagtcggtgctttt

SEQ ID NO: 586 - RNA, 100 nt, synthetic construct
  source 1..100: mol_type = other RNA
ctccttgcaggtgattctgggttttagagctagaaatagcaagttaaaataaggctagtccgttatcaacttgaaaaagtggcaccgagtcggtgctttt

SEQ ID NO: 587 - RNA, 100 nt, synthetic construct
  source 1..100: mol_type = other RNA
tgcaggttggtgtaatcagcgttttagagctagaaatagcaagttaaaataaggctagtccgttatcaacttgaaaaagtggcaccgagtcggtgctttt

SEQ ID NO: 588 - RNA, 100 nt, synthetic construct
  source 1..100: mol_type = other RNA
gcaggttggtgtaatcagctgttttagagctagaaatagcaagttaaaataaggctagtccgttatcaacttgaaaaagtggcaccgagtcggtgctttt

SEQ ID NO: 589 - RNA, 100 nt, synthetic construct; identical to SEQ ID NO: 454
  source 1..100: mol_type = other RNA

SEQ ID NO: 590 - RNA, 100 nt, synthetic construct
  source 1..100: mol_type = other RNA
cttactttgttgctggcaaggttttagagctagaaatagcaagttaaaataaggctagtccgttatcaacttgaaaaagtggcaccgagtcggtgctttt

SEQ ID NO: 591 - RNA, 100 nt, synthetic construct; identical to SEQ ID NO: 459
  source 1..100: mol_type = other RNA

SEQ ID NO: 592 - RNA, 100 nt, synthetic construct
  source 1..100: mol_type = other RNA
tcacccagataatcctccctgttttagagctagaaatagcaagttaaaataaggctagtccgttatcaacttgaaaaagtggcaccgagtcggtgctttt

SEQ ID NO: 593 - RNA, 100 nt, synthetic construct
  source 1..100: mol_type = other RNA
ccttctgaccatcagtcatggttttagagctagaaatagcaagttaaaataaggctagtccgttatcaacttgaaaaagtggcaccgagtcggtgctttt

SEQ ID NO: 594 - RNA, 100 nt, synthetic construct
  source 1..100: mol_type = other RNA
caaaggtcaccttggcaggagttttagagctagaaatagcaagttaaaataaggctagtccgttatcaacttgaaaaagtggcaccgagtcggtgctttt

SEQ ID NO: 595 - RNA, 100 nt, synthetic construct
  source 1..100: mol_type = other RNA
ctcgcttacctccagacaaggttttagagctagaaatagcaagttaaaataaggctagtccgttatcaacttgaaaaagtggcaccgagtcggtgctttt

SEQ ID NO: 596 - RNA, 100 nt, synthetic construct
  source 1..100: mol_type = other RNA
tcaaagcaatccactgtccagttttagagctagaaatagcaagttaaaataaggctagtccgttatcaacttgaaaaagtggcaccgagtcggtgctttt

SEQ ID NO: 597 - RNA, 100 nt, synthetic construct
  source 1..100: mol_type = other RNA
ctcccagactccttcatgtagttttagagctagaaatagcaagttaaaataaggctagtccgttatcaacttgaaaaagtggcaccgagtcggtgctttt

SEQ ID NO: 598 - RNA, 100 nt, synthetic construct
  source 1..100: mol_type = other RNA
cccaggggaacaacagaagcgttttagagctagaaatagcaagttaaaataaggctagtccgttatcaacttgaaaaagtggcaccgagtcggtgctttt

SEQ ID NO: 599 - RNA, 100 nt, synthetic construct
  source 1..100: mol_type = other RNA
acaggtggcaagttatggtggttttagagctagaaatagcaagttaaaataaggctagtccgttatcaacttgaaaaagtggcaccgagtcggtgctttt

SEQ ID NO: 600 - RNA, 100 nt, synthetic construct
  source 1..100: mol_type = other RNA
gccagatgaaagccagtctcgttttagagctagaaatagcaagttaaaataaggctagtccgttatcaacttgaaaaagtggcaccgagtcggtgctttt

SEQ ID NO: 601 - RNA, 100 nt, synthetic construct
  source 1..100: mol_type = other RNA
gtccccagcgcccttcaaaggttttagagctagaaatagcaagttaaaataaggctagtccgttatcaacttgaaaaagtggcaccgagtcggtgctttt

SEQ ID NO: 602 - RNA, 100 nt, synthetic construct
  source 1..100: mol_type = other RNA
tacagaaaggcagctgtgaggttttagagctagaaatagcaagttaaaataaggctagtccgttatcaacttgaaaaagtggcaccgagtcggtgctttt

SEQ ID NO: 603 - RNA, 100 nt, synthetic construct
  source 1..100: mol_type = other RNA
gaggactcacttgaatgaaagttttagagctagaaatagcaagttaaaataaggctagtccgttatcaacttgaaaaagtggcaccgagtcggtgctttt

SEQ ID NO: 604 - RNA, 100 nt, synthetic construct
  source 1..100: mol_type = other RNA
tctcaccttatccccattctgttttagagctagaaatagcaagttaaaataaggctagtccgttatcaacttgaaaaagtggcaccgagtcggtgctttt

SEQ ID NO: 605 - RNA, 100 nt, synthetic construct
  source 1..100: mol_type = other RNA
atccttacctacgctgacctgttttagagctagaaatagcaagttaaaataaggctagtccgttatcaacttgaaaaagtggcaccgagtcggtgctttt

SEQ ID NO: 606 - RNA, 100 nt, synthetic construct
  source 1..100: mol_type = other RNA
ttacctacgctgaccttgatgttttagagctagaaatagcaagttaaaataaggctagtccgttatcaacttgaaaaagtggcaccgagtcggtgctttt

SEQ ID NO: 607 - RNA, 100 nt, synthetic construct
  source 1..100: mol_type = other RNA
ctccctaccgatcatttggtgttttagagctagaaatagcaagttaaaataaggctagtccgttatcaacttgaaaaagtggcaccgagtcggtgctttt

SEQ ID NO: 608 - RNA, 100 nt, synthetic construct
  source 1..100: mol_type = other RNA
ctgaccatcagtcatgaggagttttagagctagaaatagcaagttaaaataaggctagtccgttatcaacttgaaaaagtggcaccgagtcggtgctttt

SEQ ID NO: 609 - RNA, 100 nt, synthetic construct
  source 1..100: mol_type = other RNA
cttctcacctccgttgtcacgttttagagctagaaatagcaagttaaaataaggctagtccgttatcaacttgaaaaagtggcaccgagtcggtgctttt

SEQ ID NO: 610 - RNA, 109 nt, synthetic construct
  source 1..109: mol_type = other RNA
tccctcagatgtctatgtgttgttttagtactctgtaatgaaaattacagaatctactaaaacaaggcaaaatgccgtgtttatctcgtcaacttgttggcgagatttt

SEQ ID NO: 611 - RNA, 109 nt, synthetic construct
  source 1..109: mol_type = other RNA
ctgccagatgaaagccagtctgttttagtactctgtaatgaaaattacagaatctactaaaacaaggcaaaatgccgtgtttatctcgtcaacttgttggcgagatttt

SEQ ID NO: 612 - RNA, 109 nt, synthetic construct
  source 1..109: mol_type = other RNA
ttctctcacctctgcaagtatgttttagtactctgtaatgaaaattacagaatctactaaaacaaggcaaaatgccgtgtttatctcgtcaacttgttggcgagatttt

SEQ ID NO: 613 - RNA, 109 nt, synthetic construct
  source 1..109: mol_type = other RNA
ccttacctacgctgaccttgagttttagtactctgtaatgaaaattacagaatctactaaaacaaggcaaaatgccgtgtttatctcgtcaacttgttggcgagatttt

SEQ ID NO: 614 - RNA, 109 nt, synthetic construct
  source 1..109: mol_type = other RNA
actcacccagataatcctcccgttttagtactctgtaatgaaaattacagaatctactaaaacaaggcaaaatgccgtgtttatctcgtcaacttgttggcgagatttt

SEQ ID NO: 615 - RNA, 109 nt, synthetic construct
  source 1..109: mol_type = other RNA
tcccttctgaccatcagtcatgttttagtactctgtaatgaaaattacagaatctactaaaacaaggcaaaatgccgtgtttatctcgtcaacttgttggcgagatttt

SEQ ID NO: 616 - RNA, 109 nt, synthetic construct
  source 1..109: mol_type = other RNA
cttcaggtgtgaccaccactcgttttagtactctgtaatgaaaattacagaatctactaaaacaaggcaaaatgccgtgtttatctcgtcaacttgttggcgagatttt

SEQ ID NO: 617 - RNA, 109 nt, synthetic construct
  source 1..109: mol_type = other RNA
ccctctccacagaccacaagtgttttagtactctgtaatgaaaattacagaatctactaaaacaaggcaaaatgccgtgtttatctcgtcaacttgttggcgagatttt

SEQ ID NO: 618 - RNA, 109 nt, synthetic construct
  source 1..109: mol_type = other RNA
ctacagaaaggcagctgtgaggttttagtactctgtaatgaaaattacagaatctactaaaacaaggcaaaatgccgtgtttatctcgtcaacttgttggcgagatttt

SEQ ID NO: 619 - RNA, 109 nt, synthetic construct
  source 1..109: mol_type = other RNA
gtatgtcttactttgttgctggttttagtactctgtaatgaaaattacagaatctactaaaacaaggcaaaatgccgtgtttatctcgtcaacttgttggcgagatttt

SEQ ID NO: 620 - RNA, 109 nt, synthetic construct
  source 1..109: mol_type = other RNA
tgtcttactttgttgctggcagttttagtactctgtaatgaaaattacagaatctactaaaacaaggcaaaatgccgtgtttatctcgtcaacttgttggcgagatttt

SEQ ID NO: 621 - RNA, 109 nt, synthetic construct
  source 1..109: mol_type = other RNA
tgcatccttacctacgctgacgttttagtactctgtaatgaaaattacagaatctactaaaacaaggcaaaatgccgtgtttatctcgtcaacttgttggcgagatttt

SEQ ID NO: 622 - RNA, 109 nt, synthetic construct
  source 1..109: mol_type = other RNA
ggattctgtgcttacaatgacgttttagtactctgtaatgaaaattacagaatctactaaaacaaggcaaaatgccgtgtttatctcgtcaacttgttggcgagatttt

SEQ ID NO: 623 - RNA, 109 nt, synthetic construct
  source 1..109: mol_type = other RNA
cttgtatctccctaccgatcagttttagtactctgtaatgaaaattacagaatctactaaaacaaggcaaaatgccgtgtttatctcgtcaacttgttggcgagatttt

SEQ ID NO: 624 - RNA, 109 nt, synthetic construct
  source 1..109: mol_type = other RNA
cttctgaccatcagtcatgaggttttagtactctgtaatgaaaattacagaatctactaaaacaaggcaaaatgccgtgtttatctcgtcaacttgttggcgagatttt

SEQ ID NO: 625 - RNA, 109 nt, synthetic construct
  source 1..109: mol_type = other RNA
ccctaacctctgaccttcatagttttagtactctgtaatgaaaattacagaatctactaaaacaaggcaaaatgccgtgtttatctcgtcaacttgttggcgagatttt

SEQ ID NO: 626 - RNA, 109 nt, synthetic construct
  source 1..109: mol_type = other RNA
aggaggattccaccttctcaagttttagtactctgtaatgaaaattacagaatctactaaaacaaggcaaaatgccgtgtttatctcgtcaacttgttggcgagatttt

SEQ ID NO: 627 - RNA, 109 nt, synthetic construct
  source 1..109: mol_type = other RNA
atgcttctcacctccgttgtcgttttagtactctgtaatgaaaattacagaatctactaaaacaaggcaaaatgccgtgtttatctcgtcaacttgttggcgagatttt

SEQ ID NO: 628 - RNA, 109 nt, synthetic construct
  source 1..109: mol_type = other RNA
ttctccaagagggccaggcacgttttagtactctgtaatgaaaattacagaatctactaaaacaaggcaaaatgccgtgtttatctcgtcaacttgttggcgagatttt

SEQ ID NO: 629 - RNA, 109 nt, synthetic construct
  source 1..109: mol_type = other RNA
accaaaagactgtcaggaagggttttagtactctgtaatgaaaattacagaatctactaaaacaaggcaaaatgccgtgtttatctcgtcaacttgttggcgagatttt

SEQ ID NO: 630 - RNA, 109 nt, synthetic construct
  source 1..109: mol_type = other RNA
acctgccaagtgaatggccgagttttagtactctgtaatgaaaattacagaatctactaaaacaaggcaaaatgccgtgtttatctcgtcaacttgttggcgagatttt

SEQ ID NO: 631 - RNA, 109 nt, synthetic construct
  source 1..109: mol_type = other RNA
gagcaacatgtgttcaaagtcgttttagtactctgtaatgaaaattacagaatctactaaaacaaggcaaaatgccgtgtttatctcgtcaacttgttggcgagatttt

SEQ ID NO: 632 - RNA, 109 nt, synthetic construct
  source 1..109: mol_type = other RNA
tacaccaacctgcagaggcaggttttagtactctgtaatgaaaattacagaatctactaaaacaaggcaaaatgccgtgtttatctcgtcaacttgttggcgagatttt

SEQ ID NO: 633 - RNA, 109 nt, synthetic construct
  source 1..109: mol_type = other RNA
ggctttcatctggcagagaaggttttagtactctgtaatgaaaattacagaatctactaaaacaaggcaaaatgccgtgtttatctcgtcaacttgttggcgagatttt

SEQ ID NO: 634 - RNA, 109 nt, synthetic construct
  source 1..109: mol_type = other RNA
gacatctgagggataaaaagggttttagtactctgtaatgaaaattacagaatctactaaaacaaggcaaaatgccgtgtttatctcgtcaacttgttggcgagatttt

SEQ ID NO: 635 - RNA, 109 nt, synthetic construct
  source 1..109: mol_type = other RNA
tgttgttcccctgggtgccaggttttagtactctgtaatgaaaattacagaatctactaaaacaaggcaaaatgccgtgtttatctcgtcaacttgttggcgagatttt

SEQ ID NO: 636 - RNA, 109 nt, synthetic construct
  source 1..109: mol_type = other RNA
atcgcacctgccaagtgaatggttttagtactctgtaatgaaaattacagaatctactaaaacaaggcaaaatgccgtgtttatctcgtcaacttgttggcgagatttt

SEQ ID NO: 637 - RNA, 109 nt, synthetic construct
  source 1..109: mol_type = other RNA
tggccgatggagtgggcagacgttttagtactctgtaatgaaaattacagaatctactaaaacaaggcaaaatgccgtgtttatctcgtcaacttgttggcgagatttt

SEQ ID NO: 638 - RNA, 109 nt, synthetic construct
  source 1..109: mol_type = other RNA
tcccagcggcgaacgtgtcaggttttagtactctgtaatgaaaattacagaatctactaaaacaaggcaaaatgccgtgtttatctcgtcaacttgttggcgagatttt

SEQ ID NO: 639 - RNA, 109 nt, synthetic construct
  source 1..109: mol_type = other RNA
cccaggggaacaacagaagcggttttagtactctgtaatgaaaattacagaatctactaaaacaaggcaaaatgccgtgtttatctcgtcaacttgttggcgagatttt

SEQ ID NO: 640 - RNA, 109 nt, synthetic construct
  source 1..109: mol_type = other RNA
gtcacgaagcagctcaatgaagttttagtactctgtaatgaaaattacagaatctactaaaacaaggcaaaatgccgtgtttatctcgtcaacttgttggcgagatttt

SEQ ID NO: 641 - RNA, 109 nt, synthetic construct
  source 1..109: mol_type = other RNA
ggccctccaggcagtgtacaggttttagtactctgtaatgaaaattacagaatctactaaaacaaggcaaaatgccgtgtttatctcgtcaacttgttggcgagatttt

SEQ ID NO: 642 - RNA, 109 nt, synthetic construct
  source 1..109: mol_type = other RNA
tttctaccaaatgatcggtaggttttagtactctgtaatgaaaattacagaatctactaaaacaaggcaaaatgccgtgtttatctcgtcaacttgttggcgagatttt

SEQ ID NO: 643 - RNA, 109 nt, synthetic construct
  source 1..109: mol_type = other RNA
gcaaccatggcaggccaagatgttttagtactctgtaatgaaaattacagaatctactaaaacaaggcaaaatgccgtgtttatctcgtcaacttgttggcgagatttt

SEQ ID NO: 644 - RNA, 109 nt, synthetic construct
  source 1..109: mol_type = other RNA
tcagccagggcagcacttgaagttttagtactctgtaatgaaaattacagaatctactaaaacaaggcaaaatgccgtgtttatctcgtcaacttgttggcgagatttt

SEQ ID NO: 645 - RNA, 109 nt, synthetic construct
  source 1..109: mol_type = other RNA
cttactttgttgctggcaagtgttttagtactctgtaatgaaaattacagaatctactaaaacaaggcaaaatgccgtgtttatctcgtcaacttgttggcgagatttt

SEQ ID NO: 646 - RNA, 109 nt, synthetic construct
  source 1..109: mol_type = other RNA
ctcccctcctgaagtaggagagttttagtactctgtaatgaaaattacagaatctactaaaacaaggcaaaatgccgtgtttatctcgtcaacttgttggcgagatttt

SEQ ID NO: 647 - RNA, 109 nt, synthetic construct
  source 1..109: mol_type = other RNA
tttgaagggcgctggggacacgttttagtactctgtaatgaaaattacagaatctactaaaacaaggcaaaatgccgtgtttatctcgtcaacttgttggcgagatttt

SEQ ID NO: 648 - RNA, 109 nt, synthetic construct
  source 1..109: mol_type = other RNA
tcttggcctgccatggttgctgttttagtactctgtaatgaaaattacagaatctactaaaacaaggcaaaatgccgtgtttatctcgtcaacttgttggcgagatttt

SEQ ID NO: 649 - RNA, 109 nt, synthetic construct
  source 1..109: mol_type = other RNA
tggcctgccatggttgcttgtgttttagtactctgtaatgaaaattacagaatctactaaaacaaggcaaaatgccgtgtttatctcgtcaacttgttggcgagatttt

SEQ ID NO: 650 - RNA, 109 nt, synthetic construct
  source 1..109: mol_type = other RNA
atgaaggagtctgggagagtcgttttagtactctgtaatgaaaattacagaatctactaaaacaaggcaaaatgccgtgtttatctcgtcaacttgttggcgagatttt

SEQ ID NO: 651 - RNA, 109 nt, synthetic construct
  source 1..109: mol_type = other RNA
ggagtctgggagagtcagaaagttttagtactctgtaatgaaaattacagaatctactaaaacaaggcaaaatgccgtgtttatctcgtcaacttgttggcgagatttt

SEQ ID NO: 652 - RNA, 109 nt, synthetic construct
  source 1..109: mol_type = other RNA
cgctgcagaggtatgagacatgttttagtactctgtaatgaaaattacagaatctactaaaacaaggcaaaatgccgtgtttatctcgtcaacttgttggcgagatttt

SEQ ID NO: 653 - RNA, 109 nt, synthetic construct
  source 1..109: mol_type = other RNA
actccatcggccattcacttggttttagtactctgtaatgaaaattacagaatctactaaaacaaggcaaaatgccgtgtttatctcgtcaacttgttggcgagatttt

SEQ ID NO: 654 - RNA, 109 nt, synthetic construct
  source 1..109: mol_type = other RNA
ggggccagtattccccgttctgttttagtactctgtaatgaaaattacagaatctactaaaacaaggcaaaatgccgtgtttatctcgtcaacttgttggcgagatttt

SEQ ID NO: 655 - RNA, 109 nt, synthetic construct
  source 1..109: mol_type = other RNA
ggattgctttgagaagggggggttttagtactctgtaatgaaaattacagaatctactaaaacaaggcaaaatgccgtgtttatctcgtcaacttgttggcgagatttt

SEQ ID NO: 656 - RNA, 109 nt, synthetic construct
  source 1..109: mol_type = other RNA
ttcagggtgctccaggaccccgttttagtactctgtaatgaaaattacagaatctactaaaacaaggcaaaatgccgtgtttatctcgtcaacttgttggcgagatttt

SEQ ID NO: 657 - RNA, 109 nt, synthetic construct
  source 1..109: mol_type = other RNA
gctccaggaccccgtagatctgttttagtactctgtaatgaaaattacagaatctactaaaacaaggcaaaatgccgtgtttatctcgtcaacttgttggcgagatttt

SEQ ID NO: 658 - RNA, 109 nt, synthetic construct
  source 1..109: mol_type = other RNA
tggtcacacctgaagagaaaggttttagtactctgtaatgaaaattacagaatctactaaaacaaggcaaaatgccgtgtttatctcgtcaacttgttggcgagatttt

SEQ ID NO: 659 - RNA, 109 nt, synthetic construct
  source 1..109: mol_type = other RNA
cttacctccagacaagaggccgttttagtactctgtaatgaaaattacagaatctactaaaacaaggcaaaatgccgtgtttatctcgtcaacttgttggcgagatttt

SEQ ID NO: 660 - RNA, 100 nt, synthetic construct
  source 1..100: mol_type = other RNA
ctccttccgacttctccaaggttttagagctagaaatagcaagttaaaataaggctagtccgttatcaacttgaaaaagtggcaccgagtcggtgctttt

SEQ ID NO: 661 - RNA, 100 nt, synthetic construct
  source 1..100: mol_type = other RNA
tccttccgacttctccaagagttttagagctagaaatagcaagttaaaataaggctagtccgttatcaacttgaaaaagtggcaccgagtcggtgctttt

SEQ ID NO: 662 - RNA, 100 nt, synthetic construct
  source 1..100: mol_type = other RNA
tctccaagagggccaggcacgttttagagctagaaatagcaagttaaaataaggctagtccgttatcaacttgaaaaagtggcaccgagtcggtgctttt

SEQ ID NO: 663 - RNA, 100 nt, synthetic construct
  source 1..100: mol_type = other RNA
ctcaagaccaaaagactgtcgttttagagctagaaatagcaagttaaaataaggctagtccgttatcaacttgaaaaagtggcaccgagtcggtgctttt

SEQ ID NO: 664 - RNA, 100 nt, synthetic construct
  source 1..100: mol_type = other RNA
agaccaaaagactgtcaggagttttagagctagaaatagcaagttaaaataaggctagtccgttatcaacttgaaaaagtggcaccgagtcggtgctttt

SEQ ID NO: 665 - RNA, 100 nt, synthetic construct
  source 1..100: mol_type = other RNA
cctgccaagtgaatggccgagttttagagctagaaatagcaagttaaaataaggctagtccgttatcaacttgaaaaagtggcaccgagtcggtgctttt

SEQ ID NO: 666 - RNA, 100 nt, synthetic construct
  source 1..100: mol_type = other RNA
ctcccagcggcgaacgtgtcgttttagagctagaaatagcaagttaaaataaggctagtccgttatcaacttgaaaaagtggcaccgagtcggtgctttt

SEQ ID NO: 667 - RNA, 100 nt, synthetic construct
  source 1..100: mol_type = other RNA
cagcggcgaacgtgtcaggagttttagagctagaaatagcaagttaaaataaggctagtccgttatcaacttgaaaaagtggcaccgagtcggtgctttt

SEQ ID NO: 668 - RNA, 100 nt, synthetic construct
  source 1..100: mol_type = other RNA
cggcgaacgtgtcaggaagggttttagagctagaaatagcaagttaaaataaggctagtccgttatcaacttgaaaaagtggcaccgagtcggtgctttt

SEQ ID NO: 669 - RNA, 100 nt, synthetic construct
  source 1..100: mol_type = other RNA
cgtgtcaggaaggtggctctgttttagagctagaaatagcaagttaaaataaggctagtccgttatcaacttgaaaaagtggcaccgagtcggtgctttt

SEQ ID NO: 670 - RNA, 100 nt, synthetic construct
  source 1..100: mol_type = other RNA
ttttctaccaaatgatcggtgttttagagctagaaatagcaagttaaaataaggctagtccgttatcaacttgaaaaagtggcaccgagtcggtgctttt

SEQ ID NO: 671 - RNA, 100 nt, synthetic construct
  source 1..100: mol_type = other RNA
tttctaccaaatgatcggtagttttagagctagaaatagcaagttaaaataaggctagtccgttatcaacttgaaaaagtggcaccgagtcggtgctttt

SEQ ID NO: 672 - RNA, 100 nt, synthetic construct
  source 1..100: mol_type = other RNA
gcaacaaagtaagacatactgttttagagctagaaatagcaagttaaaataaggctagtccgttatcaacttgaaaaagtggcaccgagtcggtgctttt

SEQ ID NO: 673 - RNA, 100 nt, synthetic construct
  source 1..100: mol_type = other RNA
acctctttcaagtgctgcccgttttagagctagaaatagcaagttaaaataaggctagtccgttatcaacttgaaaaagtggcaccgagtcggtgctttt

SEQ ID NO: 674 - RNA, 100 nt, synthetic construct
  source 1..100: mol_type = other RNA
gaaactccaagatgaggattgttttagagctagaaatagcaagttaaaataaggctagtccgttatcaacttgaaaaagtggcaccgagtcggtgctttt

SEQ ID NO: 675 - RNA, 100 nt, synthetic construct
  source 1..100: mol_type = other RNA
aaactccaagatgaggatttgttttagagctagaaatagcaagttaaaataaggctagtccgttatcaacttgaaaaagtggcaccgagtcggtgctttt

SEQ ID NO: 676 - RNA, 100 nt, synthetic construct
  source 1..100: mol_type = other RNA
caccaacctgcagaggcagtgttttagagctagaaatagcaagttaaaataaggctagtccgttatcaacttgaaaaagtggcaccgagtcggtgctttt

SEQ ID NO: 677 - RNA, 100 nt, synthetic construct
  source 1..100: mol_type = other RNA
accaacctgcagaggcagtggttttagagctagaaatagcaagttaaaataaggctagtccgttatcaacttgaaaaagtggcaccgagtcggtgctttt

SEQ ID NO: 678 - RNA, 100 nt, synthetic construct
  source 1..100: mol_type = other RNA
tgcctttctgtaggggaggtgttttagagctagaaatagcaagttaaaataaggctagtccgttatcaacttgaaaaagtggcaccgagtcggtgctttt

SEQ ID NO: 679 - RNA, 100 nt, synthetic construct
  source 1..100: mol_type = other RNA
aaatgggcctataaaggacagttttagagctagaaatagcaagttaaaataaggctagtccgttatcaacttgaaaaagtggcaccgagtcggtgctttt

SEQ ID NO: 680 - RNA, 100 nt, synthetic construct
  source 1..100: mol_type = other RNA
ccctcctgaagtaggagagtgttttagagctagaaatagcaagttaaaataaggctagtccgttatcaacttgaaaaagtggcaccgagtcggtgctttt

SEQ ID NO: 681 - RNA, 100 nt, synthetic construct
  source 1..100: mol_type = other RNA
tggcctgccatggttgcttggttttagagctagaaatagcaagttaaaataaggctagtccgttatcaacttgaaaaagtggcaccgagtcggtgctttt

SEQ ID NO: 682 - RNA, 100 nt, synthetic construct
  source 1..100: mol_type = other RNA
tagacatctgagggataaaagttttagagctagaaatagcaagttaaaataaggctagtccgttatcaacttgaaaaagtggcaccgagtcggtgctttt

SEQ ID NO: 683 - RNA, 100 nt, synthetic construct
  source 1..100: mol_type = other RNA
catctgagggataaaaaggagttttagagctagaaatagcaagttaaaataaggctagtccgttatcaacttgaaaaagtggcaccgagtcggtgctttt

SEQ ID NO: 684 - RNA, 100 nt, synthetic construct
  source 1..100: mol_type = other RNA
tgcaatcctgcagaagagacgttttagagctagaaatagcaagttaaaataaggctagtccgttatcaacttgaaaaagtggcaccgagtcggtgctttt

SEQ ID NO: 685 - RNA, 100 nt, synthetic construct
  source 1..100: mol_type = other RNA
gtgcggttccagccttcagggttttagagctagaaatagcaagttaaaataaggctagtccgttatcaacttgaaaaagtggcaccgagtcggtgctttt

SEQ ID NO: 686 - RNA, 100 nt, synthetic construct
  source 1..100: mol_type = other RNA
tgcggttccagccttcaggagttttagagctagaaatagcaagttaaaataaggctagtccgttatcaacttgaaaaagtggcaccgagtcggtgctttt

SEQ ID NO: 687 - RNA, 100 nt, synthetic construct
  source 1..100: mol_type = other RNA
gacccaaattttggggtatggttttagagctagaaatagcaagttaaaataaggctagtccgttatcaacttgaaaaagtggcaccgagtcggtgctttt

SEQ ID NO: 688 - RNA, 100 nt, synthetic construct
  source 1..100: mol_type = other RNA
cactccatcggccattcactgttttagagctagaaatagcaagttaaaataaggctagtccgttatcaacttgaaaaagtggcaccgagtcggtgctttt

SEQ ID NO: 689 - RNA, 100 nt, synthetic construct
  source 1..100: mol_type = other RNA
gtggattgctttgagaaggggttttagagctagaaatagcaagttaaaataaggctagtccgttatcaacttgaaaaagtggcaccgagtcggtgctttt

SEQ ID NO: 690 - RNA, 100 nt, synthetic construct
  source 1..100: mol_type = other RNA
ccccagggatcctgctctctgttttagagctagaaatagcaagttaaaataaggctagtccgttatcaacttgaaaaagtggcaccgagtcggtgctttt

SEQ ID NO: 691 - RNA, 100 nt, synthetic construct
  source 1..100: mol_type = other RNA
tcaagaccaaaagactgtcagttttagagctagaaatagcaagttaaaataaggctagtccgttatcaacttgaaaaagtggcaccgagtcggtgctttt

SEQ ID NO: 692 - RNA, 100 nt, synthetic construct
  source 1..100: mol_type = other RNA
gcacctgccaagtgaatggcgttttagagctagaaatagcaagttaaaataaggctagtccgttatcaacttgaaaaagtggcaccgagtcggtgctttt

SEQ ID NO: 693 - RNA, 100 nt, synthetic construct
  source 1..100: mol_type = other RNA
ctgccaagtgaatggccgatgttttagagctagaaatagcaagttaaaataaggctagtccgttatcaacttgaaaaagtggcaccgagtcggtgctttt

SEQ ID NO: 694 - RNA, 100 nt, synthetic construct
  source 1..100: mol_type = other RNA
gaatggccgatggagtgggcgttttagagctagaaatagcaagttaaaataaggctagtccgttatcaacttgaaaaagtggcaccgagtcggtgctttt

SEQ ID NO: 695 - RNA, 100 nt, synthetic construct
  source 1..100: mol_type = other RNA
agtgggcagacagcgatctggttttagagctagaaatagcaagttaaaataaggctagtccgttatcaacttgaaaaagtggcaccgagtcggtgctttt

SEQ ID NO: 696 - RNA, 100 nt, synthetic construct
  source 1..100: mol_type = other RNA
ggcagccagtaccgccttgagttttagagctagaaatagcaagttaaaataaggctagtccgttatcaacttgaaaaagtggcaccgagtcggtgctttt

SEQ ID NO: 697 - RNA, 100 nt, synthetic construct
  source 1..100: mol_type = other RNA
tcccagcggcgaacgtgtcagttttagagctagaaatagcaagttaaaataaggctagtccgttatcaacttgaaaaagtggcaccgagtcggtgctttt

SEQ ID NO: 698 - RNA, 100 nt, synthetic construct
  source 1..100: mol_type = other RNA
gtgtcaggaaggtggctcttgttttagagctagaaatagcaagttaaaataaggctagtccgttatcaacttgaaaaagtggcaccgagtcggtgctttt

SEQ ID NO: 699 - RNA, 100 nt, synthetic construct
  source 1..100: mol_type = other RNA
aggggaacaacagaagcggagttttagagctagaaatagcaagttaaaataaggctagtccgttatcaacttgaaaaagtggcaccgagtcggtgctttt

SEQ ID NO: 700 - RNA, 100 nt, synthetic construct
  source 1..100: mol_type = other RNA
cctccaggcagtgtacagcagttttagagctagaaatagcaagttaaaataaggctagtccgttatcaacttgaaaaagtggcaccgagtcggtgctttt

SEQ ID NO: 701 - RNA, 100 nt, synthetic construct
  source 1..100: mol_type = other RNA
ttctaccaaatgatcggtaggttttagagctagaaatagcaagttaaaataaggctagtccgttatcaacttgaaaaagtggcaccgagtcggtgctttt

SEQ ID NO: 702 - RNA, 100 nt, synthetic construct
  source 1..100: mol_type = other RNA
ctaccaaatgatcggtaggggttttagagctagaaatagcaagttaaaataaggctagtccgttatcaacttgaaaaagtggcaccgagtcggtgctttt

SEQ ID NO: 703 - RNA, 100 nt, synthetic construct
  source 1..100: mol_type = other RNA
caagcaaccatggcaggccagttttagagctagaaatagcaagttaaaataaggctagtccgttatcaacttgaaaaagtggcaccgagtcggtgctttt

SEQ ID NO: 704 - RNA, 100 nt, synthetic construct
  source 1..100: mol_type = other RNA
tatggccagactatcaggtggttttagagctagaaatagcaagttaaaataaggctagtccgttatcaacttgaaaaagtggcaccgagtcggtgctttt

SEQ ID NO: 705 - RNA, 100 nt, synthetic construct
  source 1..100: mol_type = other RNA
cacttgccagcaacaaagtagttttagagctagaaatagcaagttaaaataaggctagtccgttatcaacttgaaaaagtggcaccgagtcggtgctttt

SEQ ID NO: 706 - RNA, 100 nt, synthetic construct
  source 1..100: mol_type = other RNA
gctcaatatgccccaggctagttttagagctagaaatagcaagttaaaataaggctagtccgttatcaacttgaaaaagtggcaccgagtcggtgctttt

SEQ ID NO: 707 - RNA, 100 nt, synthetic construct
  source 1..100: mol_type = other RNA
ctttcaagtgctgccctggcgttttagagctagaaatagcaagttaaaataaggctagtccgttatcaacttgaaaaagtggcaccgagtcggtgctttt

SEQ ID NO: 708 - RNA, 100 nt, synthetic construct
  source 1..100: mol_type = other RNA
ccttcagccagggcagcactgttttagagctagaaatagcaagttaaaataaggctagtccgttatcaacttgaaaaagtggcaccgagtcggtgctttt

SEQ ID NO: 709 - RNA, 100 nt, synthetic construct
  source 1..100: mol_type = other RNA
cagccagggcagcacttgaagttttagagctagaaatagcaagttaaaataaggctagtccgttatcaacttgaaaaagtggcaccgagtcggtgctttt

SEQ ID NO: 710 - RNA, 100 nt, synthetic construct
  source 1..100: mol_type = other RNA
gcctttctgtaggggaggtggttttagagctagaaatagcaagttaaaataaggctagtccgttatcaacttgaaaaagtggcaccgagtcggtgctttt

SEQ ID NO: 711 - RNA, 100 nt, synthetic construct
  source 1..100: mol_type = other RNA
aatgggcctataaaggacaagttttagagctagaaatagcaagttaaaataaggctagtccgttatcaacttgaaaaagtggcaccgagtcggtgctttt

SEQ ID NO: 712 - RNA, 100 nt, synthetic construct
  source 1..100: mol_type = other RNA
tgggcctataaaggacaagggttttagagctagaaatagcaagttaaaataaggctagtccgttatcaacttgaaaaagtggcaccgagtcggtgctttt

SEQ ID NO: 713 - RNA, 100 nt, synthetic construct
  source 1..100: mol_type = other RNA
gtgttcccaaaccatgccacgttttagagctagaaatagcaagttaaaataaggctagtccgttatcaacttgaaaaagtggcaccgagtcggtgctttt

SEQ ID NO: 714 - RNA, 100 nt, synthetic construct
  source 1..100: mol_type = other RNA
gttcccaaaccatgccacaggttttagagctagaaatagcaagttaaaataaggctagtccgttatcaacttgaaaaagtggcaccgagtcggtgctttt

SEQ ID NO: 715 - RNA, 100 nt, synthetic construct
  source 1..100: mol_type = other RNA
gcggttccagccttcaggaggttttagagctagaaatagcaagttaaaataaggctagtccgttatcaacttgaaaaagtggcaccgagtcggtgctttt

SEQ ID NO: 716 - RNA, 100 nt, synthetic construct
  source 1..100: mol_type = other RNA
ttgtggtctgtggagagggagttttagagctagaaatagcaagttaaaataaggctagtccgttatcaacttgaaaaagtggcaccgagtcggtgctttt

SEQ ID NO: 717 - RNA, 100 nt, synthetic construct
  source 1..100: mol_type = other RNA
gagtctgggagagtcagaaagttttagagctagaaatagcaagttaaaataaggctagtccgttatcaacttgaaaaagtggcaccgagtcggtgctttt

SEQ ID NO: 718 - RNA, 100 nt, synthetic construct
  source 1..100: mol_type = other RNA
cgctccaagagccaccttccgttttagagctagaaatagcaagttaaaataaggctagtccgttatcaacttgaaaaagtggcaccgagtcggtgctttt

SEQ ID NO: 719 - RNA, 100 nt, synthetic construct
  source 1..100: mol_type = other RNA
taccccgctgcagaggtatggttttagagctagaaatagcaagttaaaataaggctagtccgttatcaacttgaaaaagtggcaccgagtcggtgctttt

SEQ ID NO: 720 - RNA, 100 nt, synthetic construct
  source 1..100: mol_type = other RNA
gggccagtattccccgttctgttttagagctagaaatagcaagttaaaataaggctagtccgttatcaacttgaaaaagtggcaccgagtcggtgctttt

SEQ ID NO: 721 - RNA, 100 nt, synthetic construct
  source 1..100: mol_type = other RNA
tggattgctttgagaagggggttttagagctagaaatagcaagttaaaataaggctagtccgttatcaacttgaaaaagtggcaccgagtcggtgctttt

SEQ ID NO: 722 - RNA, 100 nt, synthetic construct
  source 1..100: mol_type = other RNA
agggtgctccaggaccccgtgttttagagctagaaatagcaagttaaaataaggctagtccgttatcaacttgaaaaagtggcaccgagtcggtgctttt

SEQ ID NO: 723 - RNA, 100 nt, synthetic construct
  source 1..100: mol_type = other RNA
cacctgaagagaaaggctgagttttagagctagaaatagcaagttaaaataaggctagtccgttatcaacttgaaaaagtggcaccgagtcggtgctttt

SEQ ID NO: 724 - RNA, 100 nt, synthetic construct; identical to SEQ ID NO: 609
  source 1..100: mol_type = other RNA

SEQ ID NO: 725 - RNA, 100 nt, synthetic construct; identical to SEQ ID NO: 608
  source 1..100: mol_type = other RNA

SEQ ID NO: 726 - RNA, 100 nt, synthetic construct; identical to SEQ ID NO: 607
  source 1..100: mol_type = other RNA

SEQ ID NO: 727 - RNA, 100 nt, synthetic construct; identical to SEQ ID NO: 606
  source 1..100: mol_type = other RNA

SEQ ID NO: 728 - RNA, 100 nt, synthetic construct; identical to SEQ ID NO: 605
  source 1..100: mol_type = other RNA

SEQ ID NO: 729 - RNA, 100 nt, synthetic construct; identical to SEQ ID NO: 604
  source 1..100: mol_type = other RNA

SEQ ID NO: 730 - RNA, 100 nt, synthetic construct; identical to SEQ ID NO: 574
  source 1..100: mol_type = other RNA

SEQ ID NO: 731 - RNA, 100 nt, synthetic construct; identical to SEQ ID NO: 573
  source 1..100: mol_type = other RNA

SEQ ID NO: 732 - RNA, 100 nt, synthetic construct; identical to SEQ ID NO: 572
  source 1..100: mol_type = other RNA

SEQ ID NO: 733 - RNA, 100 nt, synthetic construct
  source 1..100: mol_type = other RNA
aacctgcagaggcagtgggggttttagagctagaaatagcaagttaaaataaggctagtccgttatcaacttgaaaaagtggcaccgagtcggtgctttt

SEQ ID NO: 734 - RNA, 100 nt, synthetic construct; identical to SEQ ID NO: 595
  source 1..100: mol_type = other RNA

SEQ ID NO: 735 - RNA, 100 nt, synthetic construct; identical to SEQ ID NO: 593
  source 1..100: mol_type = other RNA

SEQ ID NO: 736 - RNA, 100 nt, synthetic construct; identical to SEQ ID NO: 592
  source 1..100: mol_type = other RNA

SEQ ID NO: 737 - RNA, 100 nt, synthetic construct; identical to SEQ ID NO: 459
  source 1..100: mol_type = other RNA

SEQ ID NO: 738 - RNA, 100 nt, synthetic construct; identical to SEQ ID NO: 590
  source 1..100: mol_type = other RNA

SEQ ID NO: 739 - RNA, 100 nt, synthetic construct; identical to SEQ ID NO: 454
  source 1..100: mol_type = other RNA

SEQ ID NO: 740 - RNA, 100 nt, synthetic construct
  source 1..100: mol_type = other RNA
ccctcgcttacctccagacagttttagagctagaaatagcaagttaaaataaggctagtccgttatcaacttgaaaaagtggcaccgagtcggtgctttt

SEQ ID NO: 741 - RNA, 100 nt, synthetic construct; identical to SEQ ID NO: 609
  source 1..100: mol_type = other RNA

SEQ ID NO: 742 - RNA, 100 nt, synthetic construct
  source 1..100: mol_type = other RNA
ggtcaaaggtcaccttggcagttttagagctagaaatagcaagttaaaataaggctagtccgttatcaacttgaaaaagtggcaccgagtcggtgctttt

SEQ ID NO: 743 - RNA, 100 nt, synthetic construct
  source 1..100: mol_type = other RNA
ttccaccttctcaattaagtgttttagagctagaaatagcaagttaaaataaggctagtccgttatcaacttgaaaaagtggcaccgagtcggtgctttt

SEQ ID NO: 744 - RNA, 100 nt, synthetic construct
  source 1..100: mol_type = other RNA
taacctctgaccttcataatgttttagagctagaaatagcaagttaaaataaggctagtccgttatcaacttgaaaaagtggcaccgagtcggtgctttt

SEQ ID NO: 745 - RNA, 100 nt, synthetic construct; identical to SEQ ID NO: 608
  source 1..100: mol_type = other RNA

SEQ ID NO: 746 - RNA, 100 nt, synthetic construct
  source 1..100: mol_type = other RNA
cttctgaccatcagtcatgagttttagagctagaaatagcaagttaaaataaggctagtccgttatcaacttgaaaaagtggcaccgagtcggtgctttt

SEQ ID NO: 747 - RNA, 100 nt, synthetic construct
  source 1..100: mol_type = other RNA
tcccttctgaccatcagtcagttttagagctagaaatagcaagttaaaataaggctagtccgttatcaacttgaaaaagtggcaccgagtcggtgctttt

SEQ ID NO: 748 - RNA, 100 nt, synthetic construct; identical to SEQ ID NO: 607
  source 1..100: mol_type = other RNA

SEQ ID NO: 749 - RNA, 100 nt, synthetic construct
  source 1..100: mol_type = other RNA
ttctgtgcttacaatgactggttttagagctagaaatagcaagttaaaataaggctagtccgttatcaacttgaaaaagtggcaccgagtcggtgctttt

SEQ ID NO: 750 - RNA, 100 nt, synthetic construct; identical to SEQ ID NO: 606
  source 1..100: mol_type = other RNA

SEQ ID NO: 751 - RNA, 100 nt, synthetic construct; identical to SEQ ID NO: 605
  source 1..100: mol_type = other RNA

SEQ ID NO: 752 - RNA, 100 nt, synthetic construct; identical to SEQ ID NO: 604
  source 1..100: mol_type = other RNA

SEQ ID NO: 753 - RNA, 100 nt, synthetic construct; identical to SEQ ID NO: 603
  source 1..100: mol_type = other RNA

SEQ ID NO: 754 - RNA, 100 nt, synthetic construct; identical to SEQ ID NO: 596
  source 1..100: mol_type = other RNA

SEQ ID NO: 755 - RNA, 100 nt, synthetic construct; identical to SEQ ID NO: 597
  source 1..100: mol_type = other RNA

SEQ ID NO: 756 - RNA, 100 nt, synthetic construct
  source 1..100: mol_type = other RNA
ctggcacccaggggaacaacgttttagagctagaaatagcaagttaaaataaggctagtccgttatcaacttgaaaaagtggcaccgagtcggtgctttt

SEQ ID NO: 757 - RNA, 100 nt, synthetic construct; identical to SEQ ID NO: 598
  source 1..100: mol_type = other RNA

SEQ ID NO: 758 - RNA, 100 nt, synthetic construct; identical to SEQ ID NO: 599
  source 1..100: mol_type = other RNA

SEQ ID NO: 759 - RNA, 100 nt, synthetic construct
  source 1..100: mol_type = other RNA
cctctccacagaccacaagtgttttagagctagaaatagcaagttaaaataaggctagtccgttatcaacttgaaaaagtggcaccgagtcggtgctttt

SEQ ID NO: 760 - RNA, 100 nt, synthetic construct; identical to SEQ ID NO: 600
  source 1..100: mol_type = other RNA

SEQ ID NO: 761 - RNA, 100 nt, synthetic construct; identical to SEQ ID NO: 601
  source 1..100: mol_type = other RNA

SEQ ID NO: 762 - RNA, 100 nt, synthetic construct
  source 1..100: mol_type = other RNA
acttcaggaggggagaagcggttttagagctagaaatagcaagttaaaataaggctagtccgttatcaacttgaaaaagtggcaccgagtcggtgctttt

SEQ ID NO: 763 - RNA, 100 nt, synthetic construct
  source 1..100: mol_type = other RNA
cccctacagaaaggcagctggttttagagctagaaatagcaagttaaaataaggctagtccgttatcaacttgaaaaagtggcaccgagtcggtgctttt

SEQ ID NO: 764 - RNA, 100 nt, synthetic construct
  source 1..100: mol_type = other RNA
cctacagaaaggcagctgtggttttagagctagaaatagcaagttaaaataaggctagtccgttatcaacttgaaaaagtggcaccgagtcggtgctttt

SEQ ID NO: 765 - RNA, 100 nt, synthetic construct; identical to SEQ ID NO: 602
  source 1..100: mol_type = other RNA

SEQ ID NO: 766 - RNA, 100 nt, synthetic construct; identical to SEQ ID NO: 743
  source 1..100: mol_type = other RNA

SEQ ID NO: 767 - RNA, 100 nt, synthetic construct; identical to SEQ ID NO: 746
  source 1..100: mol_type = other RNA

SEQ ID NO: 768 - RNA, 100 nt, synthetic construct; identical to SEQ ID NO: 762
  source 1..100: mol_type = other RNA

SEQ ID NO: 769 - RNA, 100 nt, synthetic construct; identical to SEQ ID NO: 763
  source 1..100: mol_type = other RNA

SEQ ID NO: 770 - RNA, 100 nt, synthetic construct; identical to SEQ ID NO: 764
  source 1..100: mol_type = other RNA

SEQ ID NO: 771 - RNA, 100 nt, synthetic construct; identical to SEQ ID NO: 574
  source 1..100: mol_type = other RNA

SEQ ID NO: 772 - RNA, 100 nt, synthetic construct
  source 1..100: mol_type = other RNA
gccctcaaacctctgcactcgttttagagctagaaatagcaagttaaaataaggctagtccgttatcaacttgaaaaagtggcaccgagtcggtgctttt

SEQ ID NO: 773 - RNA, 100 nt, synthetic construct; identical to SEQ ID NO: 573
  source 1..100: mol_type = other RNA

SEQ ID NO: 774 - RNA, 100 nt, synthetic construct
  source 1..100: mol_type = other RNA
aaaggtcaccttggcaggaagttttagagctagaaatagcaagttaaaataaggctagtccgttatcaacttgaaaaagtggcaccgagtcggtgctttt

SEQ ID NO: 775 - RNA, 100 nt, synthetic construct
  source 1..100: mol_type = other RNA
ctgtcttcaaacctgggccggttttagagctagaaatagcaagttaaaataaggctagtccgttatcaacttgaaaaagtggcaccgagtcggtgctttt

SEQ ID NO: 776 - RNA, 100 nt, synthetic construct; identical to SEQ ID NO: 572
  source 1..100: mol_type = other RNA

SEQ ID NO: 777 - RNA, 100 nt, synthetic construct; identical to SEQ ID NO: 571
  source 1..100: mol_type = other RNA

SEQ ID NO: 778 - RNA, 100 nt, synthetic construct
  source 1..100: mol_type = other RNA
gtatgtcttactttgttgctgttttagagctagaaatagcaagttaaaataaggctagtccgttatcaacttgaaaaagtggcaccgagtcggtgctttt

SEQ ID NO: 779 - RNA, 100 nt, synthetic construct
  source 1..100: mol_type = other RNA
atacctctgcagcggggtacgttttagagctagaaatagcaagttaaaataaggctagtccgttatcaacttgaaaaagtggcaccgagtcggtgctttt

SEQ ID NO: 780 - RNA, 100 nt, synthetic construct
  source 1..100: mol_type = other RNA
gcacccaggggaacaacagagttttagagctagaaatagcaagttaaaataaggctagtccgttatcaacttgaaaaagtggcaccgagtcggtgctttt

SEQ ID NO: 781 - RNA, 100 nt, synthetic construct; identical to SEQ ID NO: 568
  source 1..100: mol_type = other RNA

SEQ ID NO: 782 - RNA, 100 nt, synthetic construct
  source 1..100: mol_type = other RNA
tcctacttcaggaggggagagttttagagctagaaatagcaagttaaaataaggctagtccgttatcaacttgaaaaagtggcaccgagtcggtgctttt

SEQ ID NO: 783 - RNA, 100 nt, synthetic construct; identical to SEQ ID NO: 569
  source 1..100: mol_type = other RNA

SEQ ID NO: 784 - RNA, 100 nt, synthetic construct
  source 1..100: mol_type = other RNA
tattcgtccagaggaagagcgttttagagctagaaatagcaagttaaaataaggctagtccgttatcaacttgaaaaagtggcaccgagtcggtgctttt

SEQ ID NO: 785 - RNA, 100 nt, synthetic construct
  source 1..100: mol_type = other RNA
ccagaggaagagctgctcccgttttagagctagaaatagcaagttaaaataaggctagtccgttatcaacttgaaaaagtggcaccgagtcggtgctttt

SEQ ID NO: 786 - RNA, 100 nt, synthetic construct
  source 1..100: mol_type = other RNA
ctctccttgcaggtgattctgttttagagctagaaatagcaagttaaaataaggctagtccgttatcaacttgaaaaagtggcaccgagtcggtgctttt

SEQ ID NO: 787 - RNA, 100 nt, synthetic construct
  source 1..100: mol_type = other RNA
tccttgcaggtgattctggcgttttagagctagaaatagcaagttaaaataaggctagtccgttatcaacttgaaaaagtggcaccgagtcggtgctttt

SEQ ID NO: 788 - RNA, 100 nt, synthetic construct; identical to SEQ ID NO: 570
  source 1..100: mol_type = other RNA

SEQ ID NO: 789 - RNA, 100 nt, synthetic construct; identical to SEQ ID NO: 772
  source 1..100: mol_type = other RNA

SEQ ID NO: 790 - RNA, 100 nt, synthetic construct; identical to SEQ ID NO: 774
  source 1..100: mol_type = other RNA

SEQ ID NO: 791 - RNA, 100 nt, synthetic construct; identical to SEQ ID NO: 780
  source 1..100: mol_type = other RNA

SEQ ID NO: 792 - RNA, 100 nt, synthetic construct; identical to SEQ ID NO: 785
  source 1..100: mol_type = other RNA

SEQ ID NO: 793 - RNA, 100 nt, synthetic construct; identical to SEQ ID NO: 787
  source 1..100: mol_type = other RNA

SEQ ID NO: 794 - RNA, 100 nt, synthetic construct; identical to SEQ ID NO: 595
  source 1..100: mol_type = other RNA

SEQ ID NO: 795 - RNA, 100 nt, synthetic construct; identical to SEQ ID NO: 594
  source 1..100: mol_type = other RNA

SEQ ID NO: 796 - RNA, 100 nt, synthetic construct; identical to SEQ ID NO: 593
  source 1..100: mol_type = other RNA

SEQ ID NO: 797 - RNA, 100 nt, synthetic construct; identical to SEQ ID NO: 592
  source 1..100: mol_type = other RNA

SEQ ID NO: 798 - RNA, 100 nt, synthetic construct
  source 1..100: mol_type = other RNA
gtatctccctaccgatcattgttttagagctagaaatagcaagttaaaataaggctagtccgttatcaacttgaaaaagtggcaccgagtcggtgctttt

SEQ ID NO: 799 - RNA, 100 nt, synthetic construct; identical to SEQ ID NO: 459
  source 1..100: mol_type = other RNA

SEQ ID NO: 800 - RNA, 100 nt, synthetic construct
  source 1..100: mol_type = other RNA
gacgctctcacctgatagtcgttttagagctagaaatagcaagttaaaataaggctagtccgttatcaacttgaaaaagtggcaccgagtcggtgctttt

SEQ ID NO: 801 - RNA, 100 nt, synthetic construct; identical to SEQ ID NO: 590
  source 1..100: mol_type = other RNA

SEQ ID NO: 802 - RNA, 100 nt, synthetic construct
  source 1..100: mol_type = other RNA
agtatgtcttactttgttgcgttttagagctagaaatagcaagttaaaataaggctagtccgttatcaacttgaaaaagtggcaccgagtcggtgctttt

SEQ ID NO: 803 - RNA, 100 nt, synthetic construct; identical to SEQ ID NO: 454
  source 1..100: mol_type = other RNA

SEQ ID NO: 804 - RNA, 100 nt, synthetic construct
  source 1..100: mol_type = other RNA
ctctcacctctgcaagtattgttttagagctagaaatagcaagttaaaataaggctagtccgttatcaacttgaaaaagtggcaccgagtcggtgctttt

SEQ ID NO: 805 - RNA, 100 nt, synthetic construct
  source 1..100: mol_type = other RNA
tctctcacctctgcaagtatgttttagagctagaaatagcaagttaaaataaggctagtccgttatcaacttgaaaaagtggcaccgagtcggtgctttt

SEQ ID NO: 806 - RNA, 100 nt, synthetic construct
  source 1..100: mol_type = other RNA
acccaggggaacaacagaaggttttagagctagaaatagcaagttaaaataaggctagtccgttatcaacttgaaaaagtggcaccgagtcggtgctttt

SEQ ID NO: 807 - RNA, 100 nt, synthetic construct; identical to SEQ ID NO: 575
  source 1..100: mol_type = other RNA

SEQ ID NO: 808 - RNA, 100 nt, synthetic construct; identical to SEQ ID NO: 576
  source 1..100: mol_type = other RNA

SEQ ID NO: 809 - RNA, 100 nt, synthetic construct
  source 1..100: mol_type = other RNA
ttctgcaggattgcacaacagttttagagctagaaatagcaagttaaaataaggctagtccgttatcaacttgaaaaagtggcaccgagtcggtgctttt

SEQ ID NO: 810 - RNA, 100 nt, synthetic construct; identical to SEQ ID NO: 577
  source 1..100: mol_type = other RNA

SEQ ID NO: 811 - RNA, 100 nt, synthetic construct; identical to SEQ ID NO: 578
  source 1..100: mol_type = other RNA

SEQ ID NO: 812 - RNA, 100 nt, synthetic construct; identical to SEQ ID NO: 579
  source 1..100: mol_type = other RNA

SEQ ID NO: 813 - RNA, 100 nt, synthetic construct; identical to SEQ ID NO: 449
  source 1..100: mol_type = other RNA

SEQ ID NO: 814 - RNA, 100 nt, synthetic construct; identical to SEQ ID NO: 581
  source 1..100: mol_type = other RNA

SEQ ID NO: 815 - RNA, 100 nt, synthetic construct; identical to SEQ ID NO: 582
  source 1..100: mol_type = other RNA

SEQ ID NO: 816 - RNA, 100 nt, synthetic construct; identical to SEQ ID NO: 583
  source 1..100: mol_type = other RNA

SEQ ID NO: 817 - RNA, 100 nt, synthetic construct; identical to SEQ ID NO: 584
  source 1..100: mol_type = other RNA

SEQ ID NO: 818 - RNA, 100 nt, synthetic construct; identical to SEQ ID NO: 585
  source 1..100: mol_type = other RNA

SEQ ID NO: 819 - RNA, 100 nt, synthetic construct
  source 1..100: mol_type = other RNA
cctctccttgcaggtgattcgttttagagctagaaatagcaagttaaaataaggctagtccgttatcaacttgaaaaagtggcaccgagtcggtgctttt

SEQ ID NO: 820 - RNA, 100 nt, synthetic construct; identical to SEQ ID NO: 586
  source 1..100: mol_type = other RNA

SEQ ID NO: 821 - RNA, 100 nt, synthetic construct; identical to SEQ ID NO: 587
  source 1..100: mol_type = other RNA

SEQ ID NO: 822 - RNA, 100 nt, synthetic construct; identical to SEQ ID NO: 588
  source 1..100: mol_type = other RNA

SEQ ID NO: 823 - RNA, 100 nt, synthetic construct; identical to SEQ ID NO: 804
  source 1..100: mol_type = other RNA

SEQ ID NO: 824 - RNA, 100 nt, synthetic construct; identical to SEQ ID NO: 805
  source 1..100: mol_type = other RNA

SEQ ID NO: 825 - RNA, 100 nt, synthetic construct; identical to SEQ ID NO: 806
  source 1..100: mol_type = other RNA

SEQ ID NO: 826 - RNA, 100 nt, synthetic construct; identical to SEQ ID NO: 809
  source 1..100: mol_type = other RNA

SEQ ID NO: 827 - RNA, 109 nt, synthetic construct; identical to SEQ ID NO: 615
  source 1..109: mol_type = other RNA

SEQ ID NO: 828 - RNA, 109 nt, synthetic construct; identical to SEQ ID NO: 614
  source 1..109: mol_type = other RNA

SEQ ID NO: 829 - RNA, 109 nt, synthetic construct; identical to SEQ ID NO: 613
  source 1..109: mol_type = other RNA

SEQ ID NO: 830 - RNA, 109 nt, synthetic construct
  source 1..109: mol_type = other RNA
gtttctcaccttatccccattgttttagtactctgtaatgaaaattacagaatctactaaaacaaggcaaaatgccgtgtttatctcgtcaacttgttggcgagatttt

SEQ ID NO: 831 - RNA, 109 nt, synthetic construct; identical to SEQ ID NO: 612
  source 1..109: mol_type = other RNA

SEQ ID NO: 832 - RNA, 109 nt, synthetic construct
  source 1..109: mol_type = other RNA
cctcacccacaggtggcaagtgttttagtactctgtaatgaaaattacagaatctactaaaacaaggcaaaatgccgtgtttatctcgtcaacttgttggcgagatttt

SEQ ID NO: 833 - RNA, 109 nt, synthetic construct; identical to SEQ ID NO: 610
  source 1..109: mol_type = other RNA

SEQ ID NO: 834 - RNA, 109 nt, synthetic construct
  source 1..109: mol_type = other RNA
ctccttctctgccagatgaaagttttagtactctgtaatgaaaattacagaatctactaaaacaaggcaaaatgccgtgtttatctcgtcaacttgttggcgagatttt

SEQ ID NO: 835 - RNA, 109 nt, synthetic construct; identical to SEQ ID NO: 611
  source 1..109: mol_type = other RNA

SEQ ID NO: 836 - RNA, 119 nt, synthetic construct
  source 1..119: mol_type = other RNA
gttctgtcttttggtcaggacaaccgtctagctataagtgctgcagggtgtgagaaactcctattgctggacgatgtctcttacgaggcattagcacccctcaaacctctgcactctgc

SEQ ID NO: 837 - RNA, 119 nt, synthetic construct
  source 1..119: mol_type = other RNA
gttctgtcttttggtcaggacaaccgtctagctataagtgctgcagggtgtgagaaactcctattgctggacgatgtctcttacgaggcattagcactgtgcttacaatgactgagatc

SEQ ID NO: 838 - RNA, 119 nt, synthetic construct
  source 1..119: mol_type = other RNA
gttctgtcttttggtcaggacaaccgtctagctataagtgctgcagggtgtgagaaactcctattgctggacgatgtctcttacgaggcattagcaccatccttacctacgctgacctt

SEQ ID NO: 839 - RNA, 119 nt, synthetic construct
  source 1..119: mol_type = other RNA
gttctgtcttttggtcaggacaaccgtctagctataagtgctgcagggtgtgagaaactcctattgctggacgatgtctcttacgaggcattagcactctcacctctgcaagtattggg

SEQ ID NO: 840 - RNA, 119 nt, synthetic construct
  source 1..119: mol_type = other RNA
gttctgtcttttggtcaggacaaccgtctagctataagtgctgcagggtgtgagaaactcctattgctggacgatgtctcttacgaggcattagcacctcttcaggtgtgaccaccact

SEQ ID NO: 841 - RNA, 119 nt, synthetic construct
  source 1..119: mol_type = other RNA
gttctgtcttttggtcaggacaaccgtctagctataagtgctgcagggtgtgagaaactcctattgctggacgatgtctcttacgaggcattagcactcaaagcaatccactgtccaag

SEQ ID NO: 842 - RNA, 119 nt, synthetic construct
  source 1..119: mol_type = other RNA
gttctgtcttttggtcaggacaaccgtctagctataagtgctgcagggtgtgagaaactcctattgctggacgatgtctcttacgaggcattagcactctgccagatgaaagccagtct

SEQ ID NO: 843 - RNA, 119 nt, synthetic construct
  source 1..119: mol_type = other RNA
gttctgtcttttggtcaggacaaccgtctagctataagtgctgcagggtgtgagaaactcctattgctggacgatgtctcttacgaggcattagcactgtccccagcgcccttcaaagg

SEQ ID NO: 844 - RNA, 119 nt, synthetic construct
  source 1..119: mol_type = other RNA
gttctgtcttttggtcaggacaaccgtctagctataagtgctgcagggtgtgagaaactcctattgctggacgatgtctcttacgaggcattagcactcctttataggcccatttgtct

SEQ ID NO: 845 - RNA, 119 nt, synthetic construct
  source 1..119: mol_type = other RNA
gttctgtcttttggtcaggacaaccgtctagctataagtgctgcagggtgtgagaaactcctattgctggacgatgtctcttacgaggcattagcacgtccagaggaagagctgctccc

SEQ ID NO: 846 - RNA, 109 nt, synthetic construct; identical to SEQ ID NO: 615
  source 1..109: mol_type = other RNA

SEQ ID NO: 847 - RNA, 109 nt, synthetic construct; identical to SEQ ID NO: 614
  source 1..109: mol_type = other RNA

SEQ ID NO: 848 - RNA, 109 nt, synthetic construct; identical to SEQ ID NO: 613
  source 1..109: mol_type = other RNA

SEQ ID NO: 849 - RNA, 109 nt, synthetic construct; identical to SEQ ID NO: 612
  source 1..109: mol_type = other RNA

SEQ ID NO: 850 - RNA, 109 nt, synthetic construct; identical to SEQ ID NO: 627
  source 1..109: mol_type = other RNA

SEQ ID NO: 851 - RNA, 109 nt, synthetic construct; identical to SEQ ID NO: 635
  source 1..109: mol_type = other RNA

SEQ ID NO: 852 - RNA, 109 nt, synthetic construct; identical to SEQ ID NO: 624
  source 1..109: mol_type = other RNA

SEQ ID NO: 853 - RNA, 109 nt, synthetic construct; identical to SEQ ID NO: 615
  source 1..109: mol_type = other RNA

SEQ ID NO: 854 - RNA, 109 nt, synthetic construct; identical to SEQ ID NO: 614
  source 1..109: mol_type = other RNA

SEQ ID NO: 855 - RNA, 109 nt, synthetic construct; identical to SEQ ID NO: 634
  source 1..109: mol_type = other RNA

SEQ ID NO: 856 - RNA, 109 nt, synthetic construct; identical to SEQ ID NO: 633
  source 1..109: mol_type = other RNA

SEQ ID NO: 857 - RNA, 109 nt, synthetic construct; identical to SEQ ID NO: 613
  source 1..109: mol_type = other RNA

SEQ ID NO: 858 - RNA, 109 nt, synthetic construct; identical to SEQ ID NO: 621
  source 1..109: mol_type = other RNA

SEQ ID NO: 859 - RNA, 109 nt, synthetic construct; identical to SEQ ID NO: 620
  source 1..109: mol_type = other RNA

SEQ ID NO: 860 - RNA, 109 nt, synthetic construct; identical to SEQ ID NO: 619
  source 1..109: mol_type = other RNA

SEQ ID NO: 861 - RNA, 109 nt, synthetic construct; identical to SEQ ID NO: 830
  source 1..109: mol_type = other RNA

SEQ ID NO: 862 - RNA, 109 nt, synthetic construct; identical to SEQ ID NO: 612
  source 1..109: mol_type = other RNA

SEQ ID NO: 863 - RNA, 109 nt, synthetic construct; identical to SEQ ID NO: 632
  source 1..109: mol_type = other RNA

SEQ ID NO: 864 - RNA, 100 nt, synthetic construct; identical to SEQ ID NO: 723
  source 1..100: mol_type = other RNA

SEQ ID NO: 865 - RNA, 100 nt, synthetic construct; identical to SEQ ID NO: 721
  source 1..100: mol_type = other RNA

SEQ ID NO: 866 - RNA, 100 nt, synthetic construct; identical to SEQ ID NO: 719
  source 1..100: mol_type = other RNA

SEQ ID NO: 867 - RNA, 100 nt, synthetic construct; identical to SEQ ID NO: 717
  source 1..100: mol_type = other RNA

SEQ ID NO: 868 - RNA, 100 nt, synthetic construct; identical to SEQ ID NO: 712
  source 1..100: mol_type = other RNA

SEQ ID NO: 869 - RNA, 100 nt, synthetic construct; identical to SEQ ID NO: 711
  source 1..100: mol_type = other RNA

SEQ ID NO: 870 - RNA, 100 nt, synthetic construct; identical to SEQ ID NO: 710
  source 1..100: mol_type = other RNA

SEQ ID NO: 871 - RNA, 100 nt, synthetic construct; identical to SEQ ID NO: 689
  source 1..100: mol_type = other RNA

SEQ ID NO: 872 - RNA, 100 nt, synthetic construct; identical to SEQ ID NO: 684
  source 1..100: mol_type = other RNA

SEQ ID NO: 873 - RNA, 100 nt, synthetic construct; identical to SEQ ID NO: 683
  source 1..100: mol_type = other RNA

SEQ ID NO: 874 - RNA, 100 nt, synthetic construct; identical to SEQ ID NO: 682
  source 1..100: mol_type = other RNA

SEQ ID NO: 875 - RNA, 100 nt, synthetic construct; identical to SEQ ID NO: 680
  source 1..100: mol_type = other RNA

SEQ ID NO: 876 - RNA, 100 nt, synthetic construct; identical to SEQ ID NO: 679
  source 1..100: mol_type = other RNA

SEQ ID NO: 877 - RNA, 100 nt, synthetic construct; identical to SEQ ID NO: 678
  source 1..100: mol_type = other RNA

SEQ ID NO: 878 - RNA, 100 nt, synthetic construct; identical to SEQ ID NO: 677
  source 1..100: mol_type = other RNA

SEQ ID NO: 879 - RNA, 100 nt, synthetic construct; identical to SEQ ID NO: 609
  source 1..100: mol_type = other RNA

SEQ ID NO: 880 - RNA, 100 nt, synthetic construct; identical to SEQ ID NO: 609
  source 1..100: mol_type = other RNA

SEQ ID NO: 881 - RNA, 100 nt, synthetic construct; identical to SEQ ID NO: 608
  source 1..100: mol_type = other RNA

SEQ ID NO: 882 - RNA, 100 nt, synthetic construct; identical to SEQ ID NO: 608
  source 1..100: mol_type = other RNA

SEQ ID NO: 883 - RNA, 100 nt, synthetic construct; identical to SEQ ID NO: 607
  source 1..100: mol_type = other RNA

SEQ ID NO: 884 - RNA, 100 nt, synthetic construct; identical to SEQ ID NO: 607
  source 1..100: mol_type = other RNA

SEQ ID NO: 885 - RNA, 100 nt, synthetic construct; identical to SEQ ID NO: 606
  source 1..100: mol_type = other RNA

SEQ ID NO: 886 - RNA, 100 nt, synthetic construct; identical to SEQ ID NO: 606
  source 1..100: mol_type = other RNA

SEQ ID NO: 887 - RNA, 100 nt, synthetic construct; identical to SEQ ID NO: 605
  source 1..100: mol_type = other RNA

SEQ ID NO: 888 - RNA, 100 nt, synthetic construct; identical to SEQ ID NO: 605
  source 1..100: mol_type = other RNA

SEQ ID NO: 889 - RNA, 100 nt, synthetic construct; identical to SEQ ID NO: 604
  source 1..100: mol_type = other RNA

SEQ ID NO: 890 - RNA, 100 nt, synthetic construct; identical to SEQ ID NO: 604
  source 1..100: mol_type = other RNA

SEQ ID NO: 891 - RNA, 100 nt, synthetic construct; identical to SEQ ID NO: 603
  source 1..100: mol_type = other RNA

SEQ ID NO: 892 - RNA, 100 nt, synthetic construct; identical to SEQ ID NO: 603
  source 1..100: mol_type = other RNA

SEQ ID NO: 893 - RNA, 100 nt, synthetic construct; identical to SEQ ID NO: 596
  source 1..100: mol_type = other RNA

SEQ ID NO: 894 - RNA, 100 nt, synthetic construct; identical to SEQ ID NO: 596
  source 1..100: mol_type = other RNA

SEQ ID NO: 895 - RNA, 100 nt, synthetic construct; identical to SEQ ID NO: 597
  source 1..100: mol_type = other RNA

SEQ ID NO: 896 - RNA, 100 nt, synthetic construct; identical to SEQ ID NO: 597
  source 1..100: mol_type = other RNA

SEQ ID NO: 897 - RNA, 100 nt, synthetic construct; identical to SEQ ID NO: 598
  source 1..100: mol_type = other RNA

SEQ ID NO: 898 - RNA, 100 nt, synthetic construct; identical to SEQ ID NO: 598
  source 1..100: mol_type = other RNA

SEQ ID NO: 899 - RNA, 100 nt, synthetic construct; identical to SEQ ID NO: 599
  source 1..100: mol_type = other RNA

SEQ ID NO: 900 - RNA, 100 nt, synthetic construct; identical to SEQ ID NO: 599
  source 1..100: mol_type = other RNA

SEQ ID NO: 901 - RNA, 100 nt, synthetic construct; identical to SEQ ID NO: 600
  source 1..100: mol_type = other RNA

SEQ ID NO: 902 - RNA, 100 nt, synthetic construct; identical to SEQ ID NO: 600
  source 1..100: mol_type = other RNA

SEQ ID NO: 903 - RNA, 100 nt, synthetic construct; identical to SEQ ID NO: 601
  source 1..100: mol_type = other RNA

SEQ ID NO: 904 - RNA, 100 nt, synthetic construct; identical to SEQ ID NO: 601
  source 1..100: mol_type = other RNA

SEQ ID NO: 905 - RNA, 100 nt, synthetic construct; identical to SEQ ID NO: 602
  source 1..100: mol_type = other RNA

SEQ ID NO: 906 - RNA, 100 nt, synthetic construct; identical to SEQ ID NO: 602
  source 1..100: mol_type = other RNA

SEQ ID NO: 907 - RNA, 100 nt, synthetic construct; identical to SEQ ID NO: 574
  source 1..100: mol_type = other RNA

SEQ ID NO: 908 - RNA, 100 nt, synthetic construct; identical to SEQ ID NO: 574
  source 1..100: mol_type = other RNA

SEQ ID NO: 909 - RNA, 100 nt, synthetic construct; identical to SEQ ID NO: 573
  source 1..100: mol_type = other RNA

SEQ ID NO: 910 - RNA, 100 nt, synthetic construct; identical to SEQ ID NO: 573
  source 1..100: mol_type = other RNA

SEQ ID NO: 911 - RNA, 100 nt, synthetic construct; identical to SEQ ID NO: 572
  source 1..100: mol_type = other RNA

SEQ ID NO: 912 - RNA, 100 nt, synthetic construct; identical to SEQ ID NO: 572
  source 1..100: mol_type = other RNA

SEQ ID NO: 913 - RNA, 100 nt, synthetic construct; identical to SEQ ID NO: 571
  source 1..100: mol_type = other RNA

SEQ ID NO: 914 - RNA, 100 nt, synthetic construct; identical to SEQ ID NO: 571
  source 1..100: mol_type = other RNA

SEQ ID NO: 915 - RNA, 100 nt, synthetic construct; identical to SEQ ID NO: 568
  source 1..100: mol_type = other RNA

SEQ ID NO: 916 - RNA, 100 nt, synthetic construct; identical to SEQ ID NO: 568
  source 1..100: mol_type = other RNA

SEQ ID NO: 917 - RNA, 100 nt, synthetic construct; identical to SEQ ID NO: 569
  source 1..100: mol_type = other RNA

SEQ ID NO: 918 - RNA, 100 nt, synthetic construct; identical to SEQ ID NO: 569
  source 1..100: mol_type = other RNA

SEQ ID NO: 919 - RNA, 100 nt, synthetic construct; identical to SEQ ID NO: 570
  source 1..100: mol_type = other RNA

SEQ ID NO: 920 - RNA, 100 nt, synthetic construct; identical to SEQ ID NO: 570
  source 1..100: mol_type = other RNA

SEQ ID NO: 921 - RNA, 100 nt, synthetic construct; identical to SEQ ID NO: 595
  source 1..100: mol_type = other RNA

SEQ ID NO: 922 - RNA, 100 nt, synthetic construct; identical to SEQ ID NO: 595
  source 1..100: mol_type = other RNA

SEQ ID NO: 923 - RNA, 100 nt, synthetic construct; identical to SEQ ID NO: 594
  source 1..100: mol_type = other RNA

SEQ ID NO: 924 - RNA, 100 nt, synthetic construct; identical to SEQ ID NO: 594
  source 1..100: mol_type = other RNA

SEQ ID NO: 925 - RNA, 100 nt, synthetic construct; identical to SEQ ID NO: 593
  source 1..100: mol_type = other RNA

SEQ ID NO: 926 - RNA, 100 nt, synthetic construct; identical to SEQ ID NO: 593
  source 1..100: mol_type = other RNA

SEQ ID NO: 927 - RNA, 100 nt, synthetic construct; identical to SEQ ID NO: 592
  source 1..100: mol_type = other RNA

SEQ ID NO: 928 - RNA, 100 nt, synthetic construct; identical to SEQ ID NO: 592
  source 1..100: mol_type = other RNA

SEQ ID NO: 929 - RNA, 100 nt, synthetic construct; identical to SEQ ID NO: 459
  source 1..100: mol_type = other RNA

SEQ ID NO: 930 - RNA, 100 nt, synthetic construct; identical to SEQ ID NO: 459
  source 1..100: mol_type = other RNA

SEQ ID NO: 931 - RNA, 100 nt, synthetic construct; identical to SEQ ID NO: 590
  source 1..100: mol_type = other RNA

SEQ ID NO: 932 - RNA, 100 nt, synthetic construct; identical to SEQ ID NO: 590
  source 1..100: mol_type = other RNA

SEQ ID NO: 933 - RNA, 100 nt, synthetic construct; identical to SEQ ID NO: 454
  source 1..100: mol_type = other RNA

SEQ ID NO: 934 - RNA, 100 nt, synthetic construct; identical to SEQ ID NO: 454
  source 1..100: mol_type = other RNA

SEQ ID NO: 935 - RNA, 100 nt, synthetic construct; identical to SEQ ID NO: 575
  source 1..100: mol_type = other RNA

SEQ ID NO: 936 - RNA, 100 nt, synthetic construct; identical to SEQ ID NO: 575
  source 1..100: mol_type = other RNA

SEQ ID NO: 937 - RNA, 100 nt, synthetic construct; identical to SEQ ID NO: 576
  source 1..100: mol_type = other RNA

SEQ ID NO: 938 - RNA, 100 nt, synthetic construct; identical to SEQ ID NO: 576
  source 1..100: mol_type = other RNA

SEQ ID NO: 939 - RNA, 100 nt, synthetic construct; identical to SEQ ID NO: 577
  source 1..100: mol_type = other RNA

SEQ ID NO: 940 - RNA, 100 nt, synthetic construct; identical to SEQ ID NO: 577
  source 1..100: mol_type = other RNA

SEQ ID NO: 941 - RNA, 100 nt, synthetic construct; identical to SEQ ID NO: 578
  source 1..100: mol_type = other RNA

SEQ ID NO: 942 - RNA, 100 nt, synthetic construct; identical to SEQ ID NO: 578
  source 1..100: mol_type = other RNA

SEQ ID NO: 943 - RNA, 100 nt, synthetic construct; identical to SEQ ID NO: 579
  source 1..100: mol_type = other RNA

SEQ ID NO: 944 - RNA, 100 nt, synthetic construct; identical to SEQ ID NO: 579
  source 1..100: mol_type = other RNA

SEQ ID NO: 945 - RNA, 100 nt, synthetic construct; identical to SEQ ID NO: 449
  source 1..100: mol_type = other RNA

SEQ ID NO: 946 - RNA, 100 nt, synthetic construct; identical to SEQ ID NO: 449
  source 1..100: mol_type = other RNA

SEQ ID NO: 947 - RNA, 100 nt, synthetic construct; identical to SEQ ID NO: 581
  source 1..100: mol_type = other RNA

SEQ ID NO: 948 - RNA, 100 nt, synthetic construct; identical to SEQ ID NO: 581
  source 1..100: mol_type = other RNA

SEQ ID NO: 949 - RNA, 100 nt, synthetic construct; identical to SEQ ID NO: 582
  source 1..100: mol_type = other RNA

SEQ ID NO: 950 - RNA, 100 nt, synthetic construct; identical to SEQ ID NO: 582
  source 1..100: mol_type = other RNA

SEQ ID NO: 951 - RNA, 100 nt, synthetic construct; identical to SEQ ID NO: 583
  source 1..100: mol_type = other RNA

SEQ ID NO: 952 - RNA, 100 nt, synthetic construct; identical to SEQ ID NO: 583
  source 1..100: mol_type = other RNA

SEQ ID NO: 953 - RNA, 100 nt, synthetic construct; identical to SEQ ID NO: 584
  source 1..100: mol_type = other RNA

SEQ ID NO: 954 - RNA, 100 nt, synthetic construct; identical to SEQ ID NO: 584
  source 1..100: mol_type = other RNA

SEQ ID NO: 955 - RNA, 100 nt, synthetic construct; identical to SEQ ID NO: 585
  source 1..100: mol_type = other RNA

SEQ ID NO: 956 - RNA, 100 nt, synthetic construct; identical to SEQ ID NO: 585
  source 1..100: mol_type = other RNA

SEQ ID NO: 957 - RNA, 100 nt, synthetic construct; identical to SEQ ID NO: 586
  source 1..100: mol_type = other RNA

SEQ ID NO: 958 - RNA, 100 nt, synthetic construct; identical to SEQ ID NO: 586
  source 1..100: mol_type = other RNA

SEQ ID NO: 959 - RNA, 100 nt, synthetic construct; identical to SEQ ID NO: 587
  source 1..100: mol_type = other RNA

SEQ ID NO: 960 - RNA, 100 nt, synthetic construct; identical to SEQ ID NO: 587
  source 1..100: mol_type = other RNA

SEQ ID NO: 961 - RNA, 100 nt, synthetic construct; identical to SEQ ID NO: 588
  source 1..100: mol_type = other RNA

SEQ ID NO: 962 - RNA, 100 nt, synthetic construct; identical to SEQ ID NO: 588
  source 1..100: mol_type = other RNA

SEQ ID NO: 963 - RNA, 109 nt, synthetic construct; identical to SEQ ID NO: 615
  source 1..109: mol_type = other RNA

SEQ ID NO: 964 - RNA, 109 nt, synthetic construct; identical to SEQ ID NO: 615
  source 1..109: mol_type = other RNA

SEQ ID NO: 965 - RNA, 109 nt, synthetic construct; identical to SEQ ID NO: 614
  source 1..109: mol_type = other RNA

SEQ ID NO: 966 - RNA, 109 nt, synthetic construct; identical to SEQ ID NO: 614
  source 1..109: mol_type = other RNA

SEQ ID NO: 967 - RNA, 109 nt, synthetic construct; identical to SEQ ID NO: 613
  source 1..109: mol_type = other RNA

SEQ ID NO: 968 - RNA, 109 nt, synthetic construct; identical to SEQ ID NO: 613
  source 1..109: mol_type = other RNA

SEQ ID NO: 969 - RNA, 109 nt, synthetic construct; identical to SEQ ID NO: 612
  source 1..109: mol_type = other RNA

SEQ ID NO: 970 - RNA, 109 nt, synthetic construct; identical to SEQ ID NO: 612
  source 1..109: mol_type = other RNA

SEQ ID NO: 971 - RNA, 109 nt, synthetic construct; identical to SEQ ID NO: 610
  source 1..109: mol_type = other RNA

SEQ ID NO: 972 - RNA, 109 nt, synthetic construct; identical to SEQ ID NO: 610
  source 1..109: mol_type = other RNA

SEQ ID NO: 973 - RNA, 109 nt, synthetic construct; identical to SEQ ID NO: 611
  source 1..109: mol_type = other RNA

SEQ ID NO: 974 - RNA, 109 nt, synthetic construct; identical to SEQ ID NO: 611
  source 1..109: mol_type = other RNA

SEQ ID NO: 975 - RNA, 109 nt, synthetic construct; identical to SEQ ID NO: 627
  source 1..109: mol_type = other RNA

SEQ ID NO: 976 - RNA, 109 nt, synthetic construct; identical to SEQ ID NO: 627
  source 1..109: mol_type = other RNA

SEQ ID NO: 977 - RNA, 109 nt, synthetic construct; identical to SEQ ID NO: 626
  source 1..109: mol_type = other RNA

SEQ ID NO: 978 - RNA, 109 nt, synthetic construct; identical to SEQ ID NO: 626
  source 1..109: mol_type = other RNA

SEQ ID NO: 979 - RNA, 109 nt, synthetic construct; identical to SEQ ID NO: 625
  source 1..109: mol_type = other RNA

SEQ ID NO: 980 - RNA, 109 nt, synthetic construct; identical to SEQ ID NO: 625
  source 1..109: mol_type = other RNA

SEQ ID NO: 981 - RNA, 109 nt, synthetic construct; identical to SEQ ID NO: 624
  source 1..109: mol_type = other RNA

SEQ ID NO: 982 - RNA, 109 nt, synthetic construct; identical to SEQ ID NO: 624
  source 1..109: mol_type = other RNA

SEQ ID NO: 983 - RNA, 109 nt, synthetic construct; identical to SEQ ID NO: 623
  source 1..109: mol_type = other RNA

SEQ ID NO: 984 - RNA, 109 nt, synthetic construct; identical to SEQ ID NO: 623
  source 1..109: mol_type = other RNA

SEQ ID NO: 985 - RNA, 109 nt, synthetic construct; identical to SEQ ID NO: 622
  source 1..109: mol_type = other RNA

SEQ ID NO: 986 - RNA, 109 nt, synthetic construct; identical to SEQ ID NO: 622
  source 1..109: mol_type = other RNA

SEQ ID NO: 987 - RNA, 109 nt, synthetic construct; identical to SEQ ID NO: 621
  source 1..109: mol_type = other RNA

SEQ ID NO: 988 - RNA, 109 nt, synthetic construct; identical to SEQ ID NO: 621
  source 1..109: mol_type = other RNA

SEQ ID NO: 989 - RNA, 109 nt, synthetic construct; identical to SEQ ID NO: 620
  source 1..109: mol_type = other RNA

SEQ ID NO: 990 - RNA, 109 nt, synthetic construct; identical to SEQ ID NO: 620
  source 1..109: mol_type = other RNA

SEQ ID NO: 991 - RNA, 109 nt, synthetic construct; identical to SEQ ID NO: 619
  source 1..109: mol_type = other RNA

SEQ ID NO: 992 - RNA, 109 nt, synthetic construct; identical to SEQ ID NO: 619
  source 1..109: mol_type = other RNA

SEQ ID NO: 993 - RNA, 109 nt, synthetic construct; identical to SEQ ID NO: 616
  source 1..109: mol_type = other RNA

SEQ ID NO: 994 - RNA, 109 nt, synthetic construct; identical to SEQ ID NO: 616
  source 1..109: mol_type = other RNA

SEQ ID NO: 995 - RNA, 109 nt, synthetic construct; identical to SEQ ID NO: 617
  source 1..109: mol_type = other RNA

SEQ ID NO: 996 - RNA, 109 nt, synthetic construct; identical to SEQ ID NO: 617
  source 1..109: mol_type = other RNA

SEQ ID NO: 997 - RNA, 109 nt, synthetic construct; identical to SEQ ID NO: 618
  source 1..109: mol_type = other RNA

SEQ ID NO: 998 - RNA, 109 nt, synthetic construct; identical to SEQ ID NO: 618
  source 1..109: mol_type = other RNA

SEQ ID NO: 999 - RNA, 109 nt, synthetic construct; identical to SEQ ID NO: 635
  source 1..109: mol_type = other RNA

SEQ ID NO: 1000 - RNA, 109 nt, synthetic construct; identical to SEQ ID NO: 635
  source 1..109: mol_type = other RNA

SEQ ID NO: 1001 - RNA, 109 nt, synthetic construct; identical to SEQ ID NO: 634
  source 1..109: mol_type = other RNA

SEQ ID NO: 1002 - RNA, 109 nt, synthetic construct; identical to SEQ ID NO: 634
  source 1..109: mol_type = other RNA

SEQ ID NO: 1003 - RNA, 109 nt, synthetic construct; identical to SEQ ID NO: 633
  source 1..109: mol_type = other RNA

SEQ ID NO: 1004 - RNA, 109 nt, synthetic construct; identical to SEQ ID NO: 633
  source 1..109: mol_type = other RNA

SEQ ID NO: 1005 - RNA, 109 nt, synthetic construct; identical to SEQ ID NO: 632
  source 1..109: mol_type = other RNA

SEQ ID NO: 1006 - RNA, 109 nt, synthetic construct; identical to SEQ ID NO: 632
  source 1..109: mol_type = other RNA

SEQ ID NO: 1007 - RNA, 109 nt, synthetic construct; identical to SEQ ID NO: 659
  source 1..109: mol_type = other RNA

SEQ ID NO: 1008 - RNA, 109 nt, synthetic construct; identical to SEQ ID NO: 659
  source 1..109: mol_type = other RNA

SEQ ID NO: 1009 - RNA, 109 nt, synthetic construct; identical to SEQ ID NO: 658
  source 1..109: mol_type = other RNA

SEQ ID NO: 1010 - RNA, 109 nt, synthetic construct; identical to SEQ ID NO: 658
  source 1..109: mol_type = other RNA

SEQ ID NO: 1011 - RNA, 109 nt, synthetic construct; identical to SEQ ID NO: 655
  source 1..109: mol_type = other RNA

SEQ ID NO: 1012 - RNA, 109 nt, synthetic construct; identical to SEQ ID NO: 655
  source 1..109: mol_type = other RNA

SEQ ID NO: 1013 - RNA, 109 nt, synthetic construct; identical to SEQ ID NO: 652
  source 1..109: mol_type = other RNA

SEQ ID NO: 1014 - RNA, 109 nt, synthetic construct; identical to SEQ ID NO: 652
  source 1..109: mol_type = other RNA

SEQ ID NO: 1015 - RNA, 109 nt, synthetic construct; identical to SEQ ID NO: 651
  source 1..109: mol_type = other RNA

SEQ ID NO: 1016 - RNA, 109 nt, synthetic construct; identical to SEQ ID NO: 651
  source 1..109: mol_type = other RNA

SEQ ID NO: 1017 - RNA, 109 nt, synthetic construct; identical to SEQ ID NO: 650
  source 1..109: mol_type = other RNA

SEQ ID NO: 1018 - RNA, 109 nt, synthetic construct; identical to SEQ ID NO: 650
  source 1..109: mol_type = other RNA

SEQ ID NO: 1019 - RNA, 109 nt, synthetic construct; identical to SEQ ID NO: 647
  source 1..109: mol_type = other RNA

SEQ ID NO: 1020 - RNA, 109 nt, synthetic construct; identical to SEQ ID NO: 647
  source 1..109: mol_type = other RNA

SEQ ID NO: 1021 - RNA, 109 nt, synthetic construct; identical to SEQ ID NO: 646
  source 1..109: mol_type = other RNA

SEQ ID NO: 1022 - RNA, 109 nt, synthetic construct; identical to SEQ ID NO: 646
  source 1..109: mol_type = other RNA

SEQ ID NO: 1023 - RNA, 109 nt, synthetic construct; identical to SEQ ID NO: 645
  source 1..109: mol_type = other RNA

SEQ ID NO: 1024 - RNA, 109 nt, synthetic construct; identical to SEQ ID NO: 645
  source 1..109: mol_type = other RNA

SEQ ID NO: 1025 - RNA, 100 nt, synthetic construct
  source 1..100: mol_type = other RNA
actccatcggccattcacttgttttagagctagaaatagcaagttaaaataaggctagtccgttatcaacttgaaaaagtggcaccgagtcggtgctttt

SEQ ID NO: 1026 - RNA, 100 nt, synthetic construct
  source 1..100: mol_type = other RNA
acccaaattttggggtatgtgttttagagctagaaatagcaagttaaaataaggctagtccgttatcaacttgaaaaagtggcaccgagtcggtgctttt

SEQ ID NO: 1027 - RNA, 100 nt, synthetic construct
  source 1..100: mol_type = other RNA
cgtgacccagtctgcattacgttttagagctagaaatagcaagttaaaataaggctagtccgttatcaacttgaaaaagtggcaccgagtcggtgctttt

SEQ ID NO: 1028 - RNA, 100 nt, synthetic construct
  source 1..100: mol_type = other RNA
gaccaaaagactgtcaggaagttttagagctagaaatagcaagttaaaataaggctagtccgttatcaacttgaaaaagtggcaccgagtcggtgctttt

SEQ ID NO: 1029 - RNA, 100 nt, synthetic construct
  source 1..100: mol_type = other RNA
ggccgatggagtgggcagacgttttagagctagaaatagcaagttaaaataaggctagtccgttatcaacttgaaaaagtggcaccgagtcggtgctttt

SEQ ID NO: 1030 - RNA, 100 nt, synthetic construct
  source 1..100: mol_type = other RNA
acccctcaagaggtggccgagttttagagctagaaatagcaagttaaaataaggctagtccgttatcaacttgaaaaagtggcaccgagtcggtgctttt

SEQ ID NO: 1031 - RNA, 100 nt, synthetic construct
  source 1..100: mol_type = other RNA
aggccctccaggcagtgtacgttttagagctagaaatagcaagttaaaataaggctagtccgttatcaacttgaaaaagtggcaccgagtcggtgctttt

SEQ ID NO: 1032 - RNA, 100 nt, synthetic construct
  source 1..100: mol_type = other RNA
tggccagactatcaggtgaggttttagagctagaaatagcaagttaaaataaggctagtccgttatcaacttgaaaaagtggcaccgagtcggtgctttt

SEQ ID NO: 1033 - RNA, 100 nt, synthetic construct
  source 1..100: mol_type = other RNA
caacaaagtaagacatacttgttttagagctagaaatagcaagttaaaataaggctagtccgttatcaacttgaaaaagtggcaccgagtcggtgctttt

SEQ ID NO: 1034 - RNA, 100 nt, synthetic construct
  source 1..100: mol_type = other RNA
caaaagcaggtacctgctcagttttagagctagaaatagcaagttaaaataaggctagtccgttatcaacttgaaaaagtggcaccgagtcggtgctttt

SEQ ID NO: 1035 - RNA, 100 nt, synthetic construct
  source 1..100: mol_type = other RNA
cctctttcaagtgctgccctgttttagagctagaaatagcaagttaaaataaggctagtccgttatcaacttgaaaaagtggcaccgagtcggtgctttt

SEQ ID NO: 1036 - RNA, 109 nt, synthetic construct
  source 1..109: mol_type = other RNA
gagaaactccaagatgaggatgttttagtactctgtaatgaaaattacagaatctactaaaacaaggcaaaatgccgtgtttatctcgtcaacttgttggcgagatttt

SEQ ID NO: 1037 - RNA, 109 nt, synthetic construct
  source 1..109: mol_type = other RNA
ctgccatggttgcttgtggtagttttagtactctgtaatgaaaattacagaatctactaaaacaaggcaaaatgccgtgtttatctcgtcaacttgttggcgagatttt

SEQ ID NO: 1038 - RNA, 109 nt, synthetic construct; identical to SEQ ID NO: 628
  source 1..109: mol_type = other RNA

SEQ ID NO: 1039 - RNA, 109 nt, synthetic construct
  source 1..109: mol_type = other RNA
accctgtgcagacacgtacctgttttagtactctgtaatgaaaattacagaatctactaaaacaaggcaaaatgccgtgtttatctcgtcaacttgttggcgagatttt

SEQ ID NO: 1040 - RNA, 109 nt, synthetic construct; identical to SEQ ID NO: 629
  source 1..109: mol_type = other RNA

SEQ ID NO: 1041 - RNA, 109 nt, synthetic construct; identical to SEQ ID NO: 630
  source 1..109: mol_type = other RNA

SEQ ID NO: 1042 - RNA, 109 nt, synthetic construct
  source 1..109: mol_type = other RNA
agacaatgagcaacatgtgttgttttagtactctgtaatgaaaattacagaatctactaaaacaaggcaaaatgccgtgtttatctcgtcaacttgttggcgagatttt

SEQ ID NO: 1043 - RNA, 109 nt, synthetic construct; identical to SEQ ID NO: 631
  source 1..109: mol_type = other RNA

SEQ ID NO: 1044 - RNA, 109 nt, synthetic construct
  source 1..109: mol_type = other RNA
ccacaagcaaccatggcaggcgttttagtactctgtaatgaaaattacagaatctactaaaacaaggcaaaatgccgtgtttatctcgtcaacttgttggcgagatttt

SEQ ID NO: 1045 - RNA, 109 nt, synthetic construct
  source 1..109: mol_type = other RNA
caaaaaccagaagcggcaaaagttttagtactctgtaatgaaaattacagaatctactaaaacaaggcaaaatgccgtgtttatctcgtcaacttgttggcgagatttt

SEQ ID NO: 1046 - RNA, 109 nt, synthetic construct; identical to SEQ ID NO: 1036
  source 1..109: mol_type = other RNA

SEQ ID NO: 1047 - RNA, 100 nt, synthetic construct; identical to SEQ ID NO: 722
  source 1..100: mol_type = other RNA

SEQ ID NO: 1048 - RNA, 100 nt, synthetic construct; identical to SEQ ID NO: 720
  source 1..100: mol_type = other RNA

SEQ ID NO: 1049 - RNA, 100 nt, synthetic construct; identical to SEQ ID NO: 718
  source 1..100: mol_type = other RNA

SEQ ID NO: 1050 - RNA, 100 nt, synthetic construct; identical to SEQ ID NO: 715
  source 1..100: mol_type = other RNA

SEQ ID NO: 1051 - RNA, 100 nt, synthetic construct; identical to SEQ ID NO: 714
  source 1..100: mol_type = other RNA

SEQ ID NO: 1052 - RNA, 100 nt, synthetic construct; identical to SEQ ID NO: 713
  source 1..100: mol_type = other RNA

SEQ ID NO: 1053 - RNA, 100 nt, synthetic construct; identical to SEQ ID NO: 709
  source 1..100: mol_type = other RNA

SEQ ID NO: 1054 - RNA, 100 nt, synthetic construct; identical to SEQ ID NO: 708
  source 1..100: mol_type = other RNA

SEQ ID NO: 1055 - RNA, 100 nt, synthetic construct; identical to SEQ ID NO: 690
  source 1..100: mol_type = other RNA

SEQ ID NO: 1056 - RNA, 100 nt, synthetic construct; identical to SEQ ID NO: 691
  source 1..100: mol_type = other RNA

SEQ ID NO: 1057 - RNA, 100 nt, synthetic construct; identical to SEQ ID NO: 692
  source 1..100: mol_type = other RNA

SEQ ID NO: 1058 - RNA, 100 nt, synthetic construct; identical to SEQ ID NO: 693
  source 1..100: mol_type = other RNA

SEQ ID NO: 1059 - RNA, 100 nt, synthetic construct; identical to SEQ ID NO: 694
  source 1..100: mol_type = other RNA

SEQ ID NO: 1060 - RNA, 100 nt, synthetic construct; identical to SEQ ID NO: 695
  source 1..100: mol_type = other RNA

SEQ ID NO: 1061 - RNA, 100 nt, synthetic construct; identical to SEQ ID NO: 696
  source 1..100: mol_type = other RNA

SEQ ID NO: 1062 - RNA, 100 nt, synthetic construct; identical to SEQ ID NO: 697
  source 1..100: mol_type = other RNA

SEQ ID NO: 1063 - RNA, 100 nt, synthetic construct; identical to SEQ ID NO: 698
  source 1..100: mol_type = other RNA

SEQ ID NO: 1064 - RNA, 100 nt, synthetic construct; identical to SEQ ID NO: 699
  source 1..100: mol_type = other RNA

SEQ ID NO: 1065 - RNA, 100 nt, synthetic construct; identical to SEQ ID NO: 700
  source 1..100: mol_type = other RNA

SEQ ID NO: 1066 - RNA, 100 nt, synthetic construct; identical to SEQ ID NO: 701
  source 1..100: mol_type = other RNA

SEQ ID NO: 1067 - RNA, 100 nt, synthetic construct; identical to SEQ ID NO: 702
  source 1..100: mol_type = other RNA

SEQ ID NO: 1068 - RNA, 100 nt, synthetic construct; identical to SEQ ID NO: 703
  source 1..100: mol_type = other RNA

SEQ ID NO: 1069 - RNA, 100 nt, synthetic construct; identical to SEQ ID NO: 704
  source 1..100: mol_type = other RNA

SEQ ID NO: 1070 - RNA, 100 nt, synthetic construct; identical to SEQ ID NO: 705
  source 1..100: mol_type = other RNA

SEQ ID NO: 1071 - RNA, 100 nt, synthetic construct; identical to SEQ ID NO: 706
  source 1..100: mol_type = other RNA

SEQ ID NO: 1072 - RNA, 100 nt, synthetic construct; identical to SEQ ID NO: 707
  source 1..100: mol_type = other RNA

SEQ ID NO: 1073 - RNA, 100 nt, synthetic construct; identical to SEQ ID NO: 688
  source 1..100: mol_type = other RNA

SEQ ID NO: 1074 - RNA, 100 nt, synthetic construct; identical to SEQ ID NO: 687
  source 1..100: mol_type = other RNA

SEQ ID NO: 1075 - RNA, 100 nt, synthetic construct; identical to SEQ ID NO: 686
  source 1..100: mol_type = other RNA

SEQ ID NO: 1076 - RNA, 100 nt, synthetic construct; identical to SEQ ID NO: 685
  source 1..100: mol_type = other RNA

SEQ ID NO: 1077 - RNA, 100 nt, synthetic construct; identical to SEQ ID NO: 681
  source 1..100: mol_type = other RNA

SEQ ID NO: 1078 - RNA, 100 nt, synthetic construct; identical to SEQ ID NO: 660
  source 1..100: mol_type = other RNA

SEQ ID NO: 1079 - RNA, 100 nt, synthetic construct; identical to SEQ ID NO: 661
  source 1..100: mol_type = other RNA

SEQ ID NO: 1080 - RNA, 100 nt, synthetic construct; identical to SEQ ID NO: 662
  source 1..100: mol_type = other RNA

SEQ ID NO: 1081 - RNA, 100 nt, synthetic construct; identical to SEQ ID NO: 663
  source 1..100: mol_type = other RNA

SEQ ID NO: 1082 - RNA, 100 nt, synthetic construct; identical to SEQ ID NO: 664
  source 1..100: mol_type = other RNA

SEQ ID NO: 1083 - RNA, 100 nt, synthetic construct; identical to SEQ ID NO: 665
  source 1..100: mol_type = other RNA

SEQ ID NO: 1084 - RNA, 100 nt, synthetic construct; identical to SEQ ID NO: 666
  source 1..100: mol_type = other RNA

SEQ ID NO: 1085 - RNA, 100 nt, synthetic construct; identical to SEQ ID NO: 667
  source 1..100: mol_type = other RNA

SEQ ID NO: 1086 - RNA, 100 nt, synthetic construct; identical to SEQ ID NO: 668
  source 1..100: mol_type = other RNA

SEQ ID NO: 1087 - RNA, 100 nt, synthetic construct; identical to SEQ ID NO: 669
  source 1..100: mol_type = other RNA

SEQ ID NO: 1088 - RNA, 100 nt, synthetic construct; identical to SEQ ID NO: 670
  source 1..100: mol_type = other RNA

SEQ ID NO: 1089 - RNA, 100 nt, synthetic construct; identical to SEQ ID NO: 671
  source 1..100: mol_type = other RNA

SEQ ID NO: 1090 - RNA, 100 nt, synthetic construct; identical to SEQ ID NO: 672
  source 1..100: mol_type = other RNA

SEQ ID NO: 1091 - RNA, 100 nt, synthetic construct; identical to SEQ ID NO: 673
  source 1..100: mol_type = other RNA

SEQ ID NO: 1092 - RNA, 100 nt, synthetic construct; identical to SEQ ID NO: 674
  source 1..100: mol_type = other RNA

SEQ ID NO: 1093 - RNA, 100 nt, synthetic construct; identical to SEQ ID NO: 675
  source 1..100: mol_type = other RNA

SEQ ID NO: 1094 - RNA, 109 nt, synthetic construct; identical to SEQ ID NO: 628
  source 1..109: mol_type = other RNA

SEQ ID NO: 1095 - RNA, 109 nt, synthetic construct; identical to SEQ ID NO: 628
  source 1..109: mol_type = other RNA

SEQ ID NO: 1096 - RNA, 109 nt, synthetic construct; identical to SEQ ID NO: 629
  source 1..109: mol_type = other RNA

SEQ ID NO: 1097 - RNA, 109 nt, synthetic construct; identical to SEQ ID NO: 629
  source 1..109: mol_type = other RNA

SEQ ID NO: 1098 - RNA, 109 nt, synthetic construct; identical to SEQ ID NO: 630
  source 1..109: mol_type = other RNA

SEQ ID NO: 1099 - RNA, 109 nt, synthetic construct; identical to SEQ ID NO: 630
  source 1..109: mol_type = other RNA

SEQ ID NO: 1100 - RNA, 109 nt, synthetic construct; identical to SEQ ID NO: 631
  source 1..109: mol_type = other RNA

SEQ ID NO: 1101 - RNA, 109 nt, synthetic construct; identical to SEQ ID NO: 631
  source 1..109: mol_type = other RNA

SEQ ID NO: 1102 - RNA, 109 nt, synthetic construct; identical to SEQ ID NO: 657
  source 1..109: mol_type = other RNA

SEQ ID NO: 1103 - RNA, 109 nt, synthetic construct; identical to SEQ ID NO: 657
  source 1..109: mol_type = other RNA

SEQ ID NO: 1104 - RNA, 109 nt, synthetic construct; identical to SEQ ID NO: 656
  source 1..109: mol_type = other RNA

SEQ ID NO: 1105 - RNA, 109 nt, synthetic construct; identical to SEQ ID NO: 656
  source 1..109: mol_type = other RNA

SEQ ID NO: 1106 - RNA, 109 nt, synthetic construct; identical to SEQ ID NO: 654
  source 1..109: mol_type = other RNA

SEQ ID NO: 1107 - RNA, 109 nt, synthetic construct; identical to SEQ ID NO: 654
  source 1..109: mol_type = other RNA

SEQ ID NO: 1108 - RNA, 109 nt, synthetic construct; identical to SEQ ID NO: 653
  source 1..109: mol_type = other RNA

SEQ ID NO: 1109 - RNA, 109 nt, synthetic construct; identical to SEQ ID NO: 653
  source 1..109: mol_type = other RNA

SEQ ID NO: 1110 - RNA, 109 nt, synthetic construct; identical to SEQ ID NO: 649
  source 1..109: mol_type = other RNA

SEQ ID NO: 1111 - RNA, 109 nt, synthetic construct; identical to SEQ ID NO: 649
  source 1..109: mol_type = other RNA

SEQ ID NO: 1112 - RNA, 109 nt, synthetic construct; identical to SEQ ID NO: 648
  source 1..109: mol_type = other RNA

SEQ ID NO: 1113 - RNA, 109 nt, synthetic construct; identical to SEQ ID NO: 648
  source 1..109: mol_type = other RNA

SEQ ID NO: 1114 - RNA, 109 nt, synthetic construct; identical to SEQ ID NO: 644
  source 1..109: mol_type = other RNA

SEQ ID NO: 1115 - RNA, 109 nt, synthetic construct; identical to SEQ ID NO: 644
  source 1..109: mol_type = other RNA

SEQ ID NO: 1116 - RNA, 109 nt, synthetic construct; identical to SEQ ID NO: 636
  source 1..109: mol_type = other RNA

SEQ ID NO: 1117 - RNA, 109 nt, synthetic construct; identical to SEQ ID NO: 636
  source 1..109: mol_type = other RNA

SEQ ID NO: 1118 - RNA, 109 nt, synthetic construct; identical to SEQ ID NO: 637
  source 1..109: mol_type = other RNA

SEQ ID NO: 1119 - RNA, 109 nt, synthetic construct; identical to SEQ ID NO: 637
  source 1..109: mol_type = other RNA

SEQ ID NO: 1120 - RNA, 109 nt, synthetic construct; identical to SEQ ID NO: 638
  source 1..109: mol_type = other RNA

SEQ ID NO: 1121 - RNA, 109 nt, synthetic construct; identical to SEQ ID NO: 638
  source 1..109: mol_type = other RNA

SEQ ID NO: 1122 - RNA, 109 nt, synthetic construct; identical to SEQ ID NO: 639
  source 1..109: mol_type = other RNA

SEQ ID NO: 1123 - RNA, 109 nt, synthetic construct; identical to SEQ ID NO: 639
  source 1..109: mol_type = other RNA

SEQ ID NO: 1124 - RNA, 109 nt, synthetic construct; identical to SEQ ID NO: 640
  source 1..109: mol_type = other RNA

SEQ ID NO: 1125 - RNA, 109 nt, synthetic construct; identical to SEQ ID NO: 640
  source 1..109: mol_type = other RNA

SEQ ID NO: 1126 - RNA, 109 nt, synthetic construct; identical to SEQ ID NO: 641
  source 1..109: mol_type = other RNA

SEQ ID NO: 1127 - RNA, 109 nt, synthetic construct; identical to SEQ ID NO: 641
  source 1..109: mol_type = other RNA

SEQ ID NO: 1128 - RNA, 109 nt, synthetic construct; identical to SEQ ID NO: 642
  source 1..109: mol_type = other RNA

SEQ ID NO: 1129 - RNA, 109 nt, synthetic construct; identical to SEQ ID NO: 642
  source 1..109: mol_type = other RNA

SEQ ID NO: 1130 - RNA, 109 nt, synthetic construct; identical to SEQ ID NO: 643
  source 1..109: mol_type = other RNA

SEQ ID NO: 1131 - RNA, 109 nt, synthetic construct; identical to SEQ ID NO: 643
  source 1..109: mol_type = other RNA

SEQ ID NO: 1132 - RNA, 100 nt, synthetic construct
  source 1..100: mol_type = other RNA
aaaaggctgggggctggtgggttttagagctagaaatagcaagttaaaataaggctagtccgttatcaacttgaaaaagtggcaccgagtcggtgctttt

SEQ ID NO: 1133 - RNA, 100 nt, synthetic construct; identical to SEQ ID NO: 1132
  source 1..100: mol_type = other RNA

SEQ ID NO: 1134 - RNA, 100 nt, synthetic construct; identical to SEQ ID NO: 1132
  source 1..100: mol_type = other RNA

SEQ ID NO: 1135 - RNA, 100 nt, synthetic construct; identical to SEQ ID NO: 1132
  source 1..100: mol_type = other RNA

SEQ ID NO: 1136 - RNA, 100 nt, synthetic construct; identical to SEQ ID NO: 1132
  source 1..100: mol_type = other RNA

SEQ ID NO: 1137 - RNA, 100 nt, synthetic construct; identical to SEQ ID NO: 1132
  source 1..100: mol_type = other RNA

SEQ ID NO: 1138 - RNA, 100 nt, synthetic construct; identical to SEQ ID NO: 1132
  source 1..100: mol_type = other RNA

SEQ ID NO: 1139 - RNA, 100 nt, synthetic construct; identical to SEQ ID NO: 1132
  source 1..100: mol_type = other RNA

SEQ ID NO: 1140 - RNA, 100 nt, synthetic construct
  source 1..100: mol_type = other RNA
aaaggctgggggctggtggggttttagagctagaaatagcaagttaaaataaggctagtccgttatcaacttgaaaaagtggcaccgagtcggtgctttt

SEQ ID NO: 1141 - RNA, 100 nt, synthetic construct; identical to SEQ ID NO: 1140
  source 1..100: mol_type = other RNA

SEQ ID NO: 1142 - RNA, 100 nt, synthetic construct; identical to SEQ ID NO: 1140
  source 1..100: mol_type = other RNA

SEQ ID NO: 1143 - RNA, 100 nt, synthetic construct; identical to SEQ ID NO: 1140
  source 1..100: mol_type = other RNA

SEQ ID NO: 1144 - RNA, 100 nt, synthetic construct
  source 1..100: mol_type = other RNA
aaggctgggggctggtgggggttttagagctagaaatagcaagttaaaataaggctagtccgttatcaacttgaaaaagtggcaccgagtcggtgctttt

SEQ ID NO: 1145 - RNA, 100 nt, synthetic construct; identical to SEQ ID NO: 1144
  source 1..100: mol_type = other RNA

SEQ ID NO: 1146 - RNA, 100 nt, synthetic construct; identical to SEQ ID NO: 1144
  source 1..100: mol_type = other RNA

SEQ ID NO: 1147 - RNA, 100 nt, synthetic construct; identical to SEQ ID NO: 1144
  source 1..100: mol_type = other RNA

SEQ ID NO: 1148 - RNA, 100 nt, synthetic construct; identical to SEQ ID NO: 1144
  source 1..100: mol_type = other RNA

SEQ ID NO: 1149 - RNA, 100 nt, synthetic construct; identical to SEQ ID NO: 1144
  source 1..100: mol_type = other RNA

SEQ ID NO: 1150 - RNA, 100 nt, synthetic construct; identical to SEQ ID NO: 1144
  source 1..100: mol_type = other RNA

SEQ ID NO: 1151 - RNA, 100 nt, synthetic construct; identical to SEQ ID NO: 1144
  source 1..100: mol_type = other RNA

SEQ ID NO: 1152 - RNA, 100 nt, synthetic construct; identical to SEQ ID NO: 1144
  source 1..100: mol_type = other RNA

SEQ ID NO: 1153 - RNA, 100 nt, synthetic construct; identical to SEQ ID NO: 1144
  source 1..100: mol_type = other RNA

SEQ ID NO: 1154 - RNA, 100 nt, synthetic construct
  source 1..100: mol_type = other RNA
aatctgtgttctggcacctggttttagagctagaaatagcaagttaaaataaggctagtccgttatcaacttgaaaaagtggcaccgagtcggtgctttt

SEQ ID NO: 1155 - RNA, 100 nt, synthetic construct; identical to SEQ ID NO: 1154
  source 1..100: mol_type = other RNA

SEQ ID NO: 1156 - RNA, 100 nt, synthetic construct; identical to SEQ ID NO: 1154
  source 1..100: mol_type = other RNA

SEQ ID NO: 1157 - RNA, 100 nt, synthetic construct; identical to SEQ ID NO: 1154
  source 1..100: mol_type = other RNA

SEQ ID NO: 1158 - RNA, 100 nt, synthetic construct; identical to SEQ ID NO: 1154
  source 1..100: mol_type = other RNA

SEQ ID NO: 1159 - RNA, 100 nt, synthetic construct; identical to SEQ ID NO: 1154
  source 1..100: mol_type = other RNA

SEQ ID NO: 1160 - RNA, 100 nt, synthetic construct; identical to SEQ ID NO: 1154
  source 1..100: mol_type = other RNA

SEQ ID NO: 1161 - RNA, 100 nt, synthetic construct; identical to SEQ ID NO: 1154
  source 1..100: mol_type = other RNA

SEQ ID NO: 1162 - RNA, 100 nt, synthetic construct; identical to SEQ ID NO: 1154
  source 1..100: mol_type = other RNA

SEQ ID NO: 1163 - RNA, 100 nt, synthetic construct; identical to SEQ ID NO: 1154
  source 1..100: mol_type = other RNA

SEQ ID NO: 1164 - RNA, 100 nt, synthetic construct
  source 1..100: mol_type = other RNA
acaatctgtgttctggcaccgttttagagctagaaatagcaagttaaaataaggctagtccgttatcaacttgaaaaagtggcaccgagtcggtgctttt

SEQ ID NO: 1165 - RNA, 100 nt, synthetic construct; identical to SEQ ID NO: 1164
  source 1..100: mol_type = other RNA

SEQ ID NO: 1166 - RNA, 100 nt, synthetic construct; identical to SEQ ID NO: 1164
  source 1..100: mol_type = other RNA

SEQ ID NO: 1167 - RNA, 100 nt, synthetic construct; identical to SEQ ID NO: 1164
  source 1..100: mol_type = other RNA

SEQ ID NO: 1168 - RNA, 100 nt, synthetic construct; identical to SEQ ID NO: 1164
  source 1..100: mol_type = other RNA

SEQ ID NO: 1169 - RNA, 100 nt, synthetic construct; identical to SEQ ID NO: 1164
  source 1..100: mol_type = other RNA

SEQ ID NO: 1170 - RNA, 100 nt, synthetic construct; identical to SEQ ID NO: 1164
  source 1..100: mol_type = other RNA

SEQ ID NO: 1171 - RNA, 100 nt, synthetic construct; identical to SEQ ID NO: 1164
  source 1..100: mol_type = other RNA

SEQ ID NO: 1172 - RNA, 100 nt, synthetic construct
  source 1..100: mol_type = other RNA
acacagattgtataaaaggcgttttagagctagaaatagcaagttaaaataaggctagtccgttatcaacttgaaaaagtggcaccgagtcggtgctttt

SEQ ID NO: 1173 - RNA, 100 nt, synthetic construct; identical to SEQ ID NO: 1172
  source 1..100: mol_type = other RNA

SEQ ID NO: 1174 - RNA, 100 nt, synthetic construct; identical to SEQ ID NO: 1172
  source 1..100: mol_type = other RNA

SEQ ID NO: 1175 - RNA, 100 nt, synthetic construct; identical to SEQ ID NO: 1172
  source 1..100: mol_type = other RNA

SEQ ID NO: 1176 - RNA, 100 nt, synthetic construct; identical to SEQ ID NO: 1172
  source 1..100: mol_type = other RNA

SEQ ID NO: 1177 - RNA, 100 nt, synthetic construct; identical to SEQ ID NO: 1172
  source 1..100: mol_type = other RNA

SEQ ID NO: 1178 - RNA, 100 nt, synthetic construct; identical to SEQ ID NO: 1172
  source 1..100: mol_type = other RNA

SEQ ID NO: 1179 - RNA, 100 nt, synthetic construct; identical to SEQ ID NO: 1172
  source 1..100: mol_type = other RNA

SEQ ID NO: 1180 - RNA, 100 nt, synthetic construct; identical to SEQ ID NO: 1172
  source 1..100: mol_type = other RNA

SEQ ID NO: 1181 - RNA, 100 nt, synthetic construct; identical to SEQ ID NO: 1172
  source 1..100: mol_type = other RNA

SEQ ID NO: 1182 - RNA, 100 nt, synthetic construct
  source 1..100: mol_type = other RNA
acagattgtataaaaggctggttttagagctagaaatagcaagttaaaataaggctagtccgttatcaacttgaaaaagtggcaccgagtcggtgctttt

SEQ ID NO: 1183 - RNA, 100 nt, synthetic construct; identical to SEQ ID NO: 1182
  source 1..100: mol_type = other RNA

SEQ ID NO: 1184 - RNA, 100 nt, synthetic construct; identical to SEQ ID NO: 1182
  source 1..100: mol_type = other RNA

SEQ ID NO: 1185 - RNA, 100 nt, synthetic construct; identical to SEQ ID NO: 1182
  source 1..100: mol_type = other RNA

SEQ ID NO: 1186 - RNA, 100 nt, synthetic construct; identical to SEQ ID NO: 1182
  source 1..100: mol_type = other RNA

SEQ ID NO: 1187 - RNA, 100 nt, synthetic construct; identical to SEQ ID NO: 1182
  source 1..100: mol_type = other RNA

SEQ ID NO: 1188 - RNA, 100 nt, synthetic construct; identical to SEQ ID NO: 1182
  source 1..100: mol_type = other RNA

SEQ ID NO: 1189 - RNA, 100 nt, synthetic construct; identical to SEQ ID NO: 1182
  source 1..100: mol_type = other RNA

SEQ ID NO: 1190 - RNA, 100 nt, synthetic construct; identical to SEQ ID NO: 1182
  source 1..100: mol_type = other RNA

SEQ ID NO: 1191 - RNA, 100 nt, synthetic construct; identical to SEQ ID NO: 1182
  source 1..100: mol_type = other RNA

SEQ ID NO: 1192 - RNA, 100 nt, synthetic construct
  source 1..100: mol_type = other RNA
agaacacagattgtataaaagttttagagctagaaatagcaagttaaaataaggctagtccgttatcaacttgaaaaagtggcaccgagtcggtgctttt

SEQ ID NO: 1193 - RNA, 100 nt, synthetic construct; identical to SEQ ID NO: 1192
  source 1..100: mol_type = other RNA

SEQ ID NO: 1194 - RNA, 100 nt, synthetic construct; identical to SEQ ID NO: 1192
  source 1..100: mol_type = other RNA

SEQ ID NO: 1195 - RNA, 100 nt, synthetic construct; identical to SEQ ID NO: 1192
  source 1..100: mol_type = other RNA

SEQ ID NO: 1196 - RNA, 100 nt, synthetic construct; identical to SEQ ID NO: 1192
  source 1..100: mol_type = other RNA

SEQ ID NO: 1197 - RNA, 100 nt, synthetic construct; identical to SEQ ID NO: 1192
  source 1..100: mol_type = other RNA

SEQ ID NO: 1198 - RNA, 100 nt, synthetic construct; identical to SEQ ID NO: 1192
  source 1..100: mol_type = other RNA

SEQ ID NO: 1199 - RNA, 100 nt, synthetic construct; identical to SEQ ID NO: 1192
  source 1..100: mol_type = other RNA

SEQ ID NO: 1200 - RNA, 100 nt, synthetic construct; identical to SEQ ID NO: 1192
  source 1..100: mol_type = other RNA

SEQ ID NO: 1201 - RNA, 100 nt, synthetic construct
  source 1..100: mol_type = other RNA
agattgtataaaaggctggggttttagagctagaaatagcaagttaaaataaggctagtccgttatcaacttgaaaaagtggcaccgagtcggtgctttt

SEQ ID NO: 1202 - RNA, 100 nt, synthetic construct; identical to SEQ ID NO: 1201
  source 1..100: mol_type = other RNA

SEQ ID NO: 1203 - RNA, 100 nt, synthetic construct; identical to SEQ ID NO: 1201
  source 1..100: mol_type = other RNA

SEQ ID NO: 1204 - RNA, 100 nt, synthetic construct; identical to SEQ ID NO: 1201
  source 1..100: mol_type = other RNA

SEQ ID NO: 1205 - RNA, 100 nt, synthetic construct; identical to SEQ ID NO: 1201
  source 1..100: mol_type = other RNA

SEQ ID NO: 1206 - RNA, 100 nt, synthetic construct; identical to SEQ ID NO: 1201
  source 1..100: mol_type = other RNA

SEQ ID NO: 1207 - RNA, 100 nt, synthetic construct; identical to SEQ ID NO: 1201
  source 1..100: mol_type = other RNA

SEQ ID NO: 1208 - RNA, 100 nt, synthetic construct; identical to SEQ ID NO: 1201
  source 1..100: mol_type = other RNA

SEQ ID NO: 1209 - RNA, 100 nt, synthetic construct; identical to SEQ ID NO: 1201
  source 1..100: mol_type = other RNA

SEQ ID NO: 1210 - RNA, 100 nt, synthetic construct; identical to SEQ ID NO: 1201
  source 1..100: mol_type = other RNA

SEQ ID NO: 1211 - RNA, 109 nt, synthetic construct
  source 1..109: mol_type = other RNA
agattgtataaaaggctgggggttttagtactctgtaatgaaaattacagaatctactaaaacaaggcaaaatgccgtgtttatctcgtcaacttgttggcgagatttt

SEQ ID NO: 1212 - RNA, 100 nt, synthetic construct
  source 1..100: mol_type = other RNA
ataaaaggctgggggctggtgttttagagctagaaatagcaagttaaaataaggctagtccgttatcaacttgaaaaagtggcaccgagtcggtgctttt

SEQ ID NO: 1213 - RNA, 100 nt, synthetic construct; identical to SEQ ID NO: 1212
  source 1..100: mol_type = other RNA

SEQ ID NO: 1214 - RNA, 100 nt, synthetic construct; identical to SEQ ID NO: 1212
  source 1..100: mol_type = other RNA

SEQ ID NO: 1215 - RNA, 100 nt, synthetic construct; identical to SEQ ID NO: 1212
  source 1..100: mol_type = other RNA

SEQ ID NO: 1216 - RNA, 100 nt, synthetic construct; identical to SEQ ID NO: 1212
  source 1..100: mol_type = other RNA

SEQ ID NO: 1217 - RNA, 100 nt, synthetic construct; identical to SEQ ID NO: 1212
  source 1..100: mol_type = other RNA

SEQ ID NO: 1218 - RNA, 100 nt, synthetic construct; identical to SEQ ID NO: 1212
  source 1..100: mol_type = other RNA

SEQ ID NO: 1219 - RNA, 100 nt, synthetic construct; identical to SEQ ID NO: 1212
  source 1..100: mol_type = other RNA

SEQ ID NO: 1220 - RNA, 100 nt, synthetic construct; identical to SEQ ID NO: 1212
  source 1..100: mol_type = other RNA

SEQ ID NO: 1221 - RNA, 100 nt, synthetic construct
  source 1..100: mol_type = other RNA
atctgtgttctggcacctgcgttttagagctagaaatagcaagttaaaataaggctagtccgttatcaacttgaaaaagtggcaccgagtcggtgctttt

SEQ ID NO: 1222 - RNA, 100 nt, synthetic construct; identical to SEQ ID NO: 1221
  source 1..100: mol_type = other RNA

SEQ ID NO: 1223 - RNA, 100 nt, synthetic construct; identical to SEQ ID NO: 1221
  source 1..100: mol_type = other RNA

SEQ ID NO: 1224 - RNA, 100 nt, synthetic construct; identical to SEQ ID NO: 1221
  source 1..100: mol_type = other RNA

SEQ ID NO: 1225 - RNA, 100 nt, synthetic construct; identical to SEQ ID NO: 1221
  source 1..100: mol_type = other RNA

SEQ ID NO: 1226 - RNA, 100 nt, synthetic construct; identical to SEQ ID NO: 1221
  source 1..100: mol_type = other RNA

SEQ ID NO: 1227 - RNA, 100 nt, synthetic construct; identical to SEQ ID NO: 1221
  source 1..100: mol_type = other RNA

SEQ ID NO: 1228 - RNA, 100 nt, synthetic construct; identical to SEQ ID NO: 1221
  source 1..100: mol_type = other RNA

SEQ ID NO: 1229 - RNA, 100 nt, synthetic construct; identical to SEQ ID NO: 1221
  source 1..100: mol_type = other RNA

SEQ ID NO: 1230 - RNA, 100 nt, synthetic construct
  source 1..100: mol_type = other RNA
cacagattgtataaaaggctgttttagagctagaaatagcaagttaaaataaggctagtccgttatcaacttgaaaaagtggcaccgagtcggtgctttt

SEQ ID NO: 1231 - RNA, 100 nt, synthetic construct; identical to SEQ ID NO: 1230
  source 1..100: mol_type = other RNA

SEQ ID NO: 1232 - RNA, 100 nt, synthetic construct; identical to SEQ ID NO: 1230
  source 1..100: mol_type = other RNA

SEQ ID NO: 1233 - RNA, 100 nt, synthetic construct; identical to SEQ ID NO: 1230
  source 1..100: mol_type = other RNA

SEQ ID NO: 1234 - RNA, 100 nt, synthetic construct; identical to SEQ ID NO: 1230
  source 1..100: mol_type = other RNA

SEQ ID NO: 1235 - RNA, 100 nt, synthetic construct; identical to SEQ ID NO: 1230
  source 1..100: mol_type = other RNA

SEQ ID NO: 1236 - RNA, 100 nt, synthetic construct; identical to SEQ ID NO: 1230
  source 1..100: mol_type = other RNA

SEQ ID NO: 1237 - RNA, 100 nt, synthetic construct; identical to SEQ ID NO: 1230
  source 1..100: mol_type = other RNA

SEQ ID NO: 1238 - RNA, 100 nt, synthetic construct; identical to SEQ ID NO: 1230
  source 1..100: mol_type = other RNA

SEQ ID NO: 1239 - RNA, 100 nt, synthetic construct; identical to SEQ ID NO: 1230
  source 1..100: mol_type = other RNA

SEQ ID NO: 1240 - RNA, 100 nt, synthetic construct
  source 1..100: mol_type = other RNA
cagaacacagattgtataaagttttagagctagaaatagcaagttaaaataaggctagtccgttatcaacttgaaaaagtggcaccgagtcggtgctttt

SEQ ID NO: 1241 - RNA, 100 nt, synthetic construct; identical to SEQ ID NO: 1240
  source 1..100: mol_type = other RNA

SEQ ID NO: 1242 - RNA, 100 nt, synthetic construct; identical to SEQ ID NO: 1240
  source 1..100: mol_type = other RNA

SEQ ID NO: 1243 - RNA, 100 nt, synthetic construct; identical to SEQ ID NO: 1240
  source 1..100: mol_type = other RNA

SEQ ID NO: 1244 - RNA, 100 nt, synthetic construct; identical to SEQ ID NO: 1240
  source 1..100: mol_type = other RNA

SEQ ID NO: 1245 - RNA, 100 nt, synthetic construct; identical to SEQ ID NO: 1240
  source 1..100: mol_type = other RNA

SEQ ID NO: 1246 - RNA, 100 nt, synthetic construct; identical to SEQ ID NO: 1240
  source 1..100: mol_type = other RNA

SEQ ID NO: 1247 - RNA, 100 nt, synthetic construct; identical to SEQ ID NO: 1240
  source 1..100: mol_type = other RNA

SEQ ID NO: 1248 - RNA, 100 nt, synthetic construct; identical to SEQ ID NO: 1240
  source 1..100: mol_type = other RNA

SEQ ID NO: 1249 - RNA, 100 nt, synthetic construct; identical to SEQ ID NO: 1240
  source 1..100: mol_type = other RNA

SEQ ID NO: 1250 - RNA, 100 nt, synthetic construct; identical to SEQ ID NO: 1240
  source 1..100: mol_type = other RNA

SEQ ID NO: 1251 - RNA, 100 nt, synthetic construct
  source 1..100: mol_type = other RNA
cagattgtataaaaggctgggttttagagctagaaatagcaagttaaaataaggctagtccgttatcaacttgaaaaagtggcaccgagtcggtgctttt

SEQ ID NO: 1252 - RNA, 100 nt, synthetic construct; identical to SEQ ID NO: 1251
  source 1..100: mol_type = other RNA

SEQ ID NO: 1253 - RNA, 100 nt, synthetic construct; identical to SEQ ID NO: 1251
  source 1..100: mol_type = other RNA

SEQ ID NO: 1254 - RNA, 100 nt, synthetic construct; identical to SEQ ID NO: 1251
  source 1..100: mol_type = other RNA

SEQ ID NO: 1255 - RNA, 100 nt, synthetic construct; identical to SEQ ID NO: 1251
  source 1..100: mol_type = other RNA

SEQ ID NO: 1256 - RNA, 100 nt, synthetic construct; identical to SEQ ID NO: 1251
  source 1..100: mol_type = other RNA

SEQ ID NO: 1257 - RNA, 100 nt, synthetic construct; identical to SEQ ID NO: 1251
  source 1..100: mol_type = other RNA

SEQ ID NO: 1258 - RNA, 100 nt, synthetic construct; identical to SEQ ID NO: 1251
  source 1..100: mol_type = other RNA

SEQ ID NO: 1259 - RNA, 100 nt, synthetic construct; identical to SEQ ID NO: 1251
  source 1..100: mol_type = other RNA

SEQ ID NO: 1260 - RNA, 100 nt, synthetic construct; identical to SEQ ID NO: 1251
  source 1..100: mol_type = other RNA

SEQ ID NO: 1261 - RNA, 100 nt, synthetic construct; identical to SEQ ID NO: 1251
  source 1..100: mol_type = other RNA

SEQ ID NO: 1262 - RNA, 100 nt, synthetic construct
  source 1..100: mol_type = other RNA
cagcccccagccttttatacgttttagagctagaaatagcaagttaaaataaggctagtccgttatcaacttgaaaaagtggcaccgagtcggtgctttt

SEQ ID NO: 1263 - RNA, 100 nt, synthetic construct; identical to SEQ ID NO: 1262
  source 1..100: mol_type = other RNA

SEQ ID NO: 1264 - RNA, 100 nt, synthetic construct; identical to SEQ ID NO: 1262
  source 1..100: mol_type = other RNA

SEQ ID NO: 1265 - RNA, 100 nt, synthetic construct; identical to SEQ ID NO: 1262
  source 1..100: mol_type = other RNA

SEQ ID NO: 1266 - RNA, 100 nt, synthetic construct; identical to SEQ ID NO: 1262
  source 1..100: mol_type = other RNA

SEQ ID NO: 1267 - RNA, 109 nt, synthetic construct
  source 1..109: mol_type = other RNA
ccaccagcccccagccttttagttttagtactctgtaatgaaaattacagaatctactaaaacaaggcaaaatgccgtgtttatctcgtcaacttgttggcgagatttt

SEQ ID NO: 1268 - RNA, 100 nt, synthetic construct
  source 1..100: mol_type = other RNA
ccagcccccagccttttatagttttagagctagaaatagcaagttaaaataaggctagtccgttatcaacttgaaaaagtggcaccgagtcggtgctttt

SEQ ID NO: 1269 - RNA, 100 nt, synthetic construct; identical to SEQ ID NO: 1268
  source 1..100: mol_type = other RNA

SEQ ID NO: 1270 - RNA, 100 nt, synthetic construct; identical to SEQ ID NO: 1268
  source 1..100: mol_type = other RNA

SEQ ID NO: 1271 - RNA, 100 nt, synthetic construct; identical to SEQ ID NO: 1268
  source 1..100: mol_type = other RNA

SEQ ID NO: 1272 - RNA, 100 nt, synthetic construct
  source 1..100: mol_type = other RNA
ccagccttttatacaatctggttttagagctagaaatagcaagttaaaataaggctagtccgttatcaacttgaaaaagtggcaccgagtcggtgctttt

SEQ ID NO: 1273 - RNA, 100 nt, synthetic construct; identical to SEQ ID NO: 1272
  source 1..100: mol_type = other RNA

SEQ ID NO: 1274 - RNA, 100 nt, synthetic construct; identical to SEQ ID NO: 1272
  source 1..100: mol_type = other RNA

SEQ ID NO: 1275 - RNA, 100 nt, synthetic construct; identical to SEQ ID NO: 1272
  source 1..100: mol_type = other RNA

SEQ ID NO: 1276 - RNA, 100 nt, synthetic construct; identical to SEQ ID NO: 1272
  source 1..100: mol_type = other RNA

SEQ ID NO: 1277 - RNA, 100 nt, synthetic construct; identical to SEQ ID NO: 1272
  source 1..100: mol_type = other RNA

SEQ ID NO: 1278 - RNA, 100 nt, synthetic construct; identical to SEQ ID NO: 1272
  source 1..100: mol_type = other RNA

SEQ ID NO: 1279 - RNA, 100 nt, synthetic construct
  source 1..100: mol_type = other RNA
ccccagccttttatacaatcgttttagagctagaaatagcaagttaaaataaggctagtccgttatcaacttgaaaaagtggcaccgagtcggtgctttt

SEQ ID NO: 1280 - RNA, 100 nt, synthetic construct; identical to SEQ ID NO: 1279
  source 1..100: mol_type = other RNA

SEQ ID NO: 1281 - RNA, 100 nt, synthetic construct; identical to SEQ ID NO: 1279
  source 1..100: mol_type = other RNA

SEQ ID NO: 1282 - RNA, 100 nt, synthetic construct; identical to SEQ ID NO: 1279
  source 1..100: mol_type = other RNA

SEQ ID NO: 1283 - RNA, 100 nt, synthetic construct; identical to SEQ ID NO: 1279
  source 1..100: mol_type = other RNA

SEQ ID NO: 1284 - RNA, 100 nt, synthetic construct
  source 1..100: mol_type = other RNA
ctgggggctggtggggagcagttttagagctagaaatagcaagttaaaataaggctagtccgttatcaacttgaaaaagtggcaccgagtcggtgctttt

SEQ ID NO: 1285 - RNA, 100 nt, synthetic construct; identical to SEQ ID NO: 1284
  source 1..100: mol_type = other RNA

SEQ ID NO: 1286 - RNA, 100 nt, synthetic construct; identical to SEQ ID NO: 1284
  source 1..100: mol_type = other RNA

SEQ ID NO: 1287 - RNA, 100 nt, synthetic construct; identical to SEQ ID NO: 1284
  source 1..100: mol_type = other RNA

SEQ ID NO: 1288 - RNA, 100 nt, synthetic construct; identical to SEQ ID NO: 1284
  source 1..100: mol_type = other RNA

SEQ ID NO: 1289 - RNA, 100 nt, synthetic construct; identical to SEQ ID NO: 1284
  source 1..100: mol_type = other RNA

SEQ ID NO: 1290 - RNA, 100 nt, synthetic construct; identical to SEQ ID NO: 1284
  source 1..100: mol_type = other RNA

SEQ ID NO: 1291 - RNA, 100 nt, synthetic construct; identical to SEQ ID NO: 1284
  source 1..100: mol_type = other RNA

SEQ ID NO: 1292 - RNA, 100 nt, synthetic construct; identical to SEQ ID NO: 1284
  source 1..100: mol_type = other RNA

SEQ ID NO: 1293 - RNA, 100 nt, synthetic construct; identical to SEQ ID NO: 1284
  source 1..100: mol_type = other RNA

SEQ ID NO: 1294 - RNA, 100 nt, synthetic construct
  source 1..100: mol_type = other RNA
cttttatacaatctgtgttcgttttagagctagaaatagcaagttaaaataaggctagtccgttatcaacttgaaaaagtggcaccgagtcggtgctttt

SEQ ID NO: 1295 - RNA, 100 nt, synthetic construct; identical to SEQ ID NO: 1294
  source 1..100: mol_type = other RNA

SEQ ID NO: 1296 - RNA, 100 nt, synthetic construct; identical to SEQ ID NO: 1294
  source 1..100: mol_type = other RNA

SEQ ID NO: 1297 - RNA, 100 nt, synthetic construct; identical to SEQ ID NO: 1294
  source 1..100: mol_type = other RNA

SEQ ID NO: 1298 - RNA, 100 nt, synthetic construct; identical to SEQ ID NO: 1294
  source 1..100: mol_type = other RNA

SEQ ID NO: 1299 - RNA, 100 nt, synthetic construct; identical to SEQ ID NO: 1294
  source 1..100: mol_type = other RNA

SEQ ID NO: 1300 - RNA, 100 nt, synthetic construct; identical to SEQ ID NO: 1294
  source 1..100: mol_type = other RNA

SEQ ID NO: 1301 - RNA, 100 nt, synthetic construct; identical to SEQ ID NO: 1294
  source 1..100: mol_type = other RNA

SEQ ID NO: 1302 - RNA, 100 nt, synthetic construct; identical to SEQ ID NO: 1294
  source 1..100: mol_type = other RNA

SEQ ID NO: 1303 - RNA, 100 nt, synthetic construct; identical to SEQ ID NO: 1294
  source 1..100: mol_type = other RNA

SEQ ID NO: 1304 - RNA, 100 nt, synthetic construct; identical to SEQ ID NO: 1294
  source 1..100: mol_type = other RNA

SEQ ID NO: 1305 - RNA, 100 nt, synthetic construct
  source 1..100: mol_type = other RNA
gctgggggctggtggggagcgttttagagctagaaatagcaagttaaaataaggctagtccgttatcaacttgaaaaagtggcaccgagtcggtgctttt

SEQ ID NO: 1306 - RNA, 100 nt, synthetic construct; identical to SEQ ID NO: 1305
  source 1..100: mol_type = other RNA

SEQ ID NO: 1307 - RNA, 100 nt, synthetic construct; identical to SEQ ID NO: 1305
  source 1..100: mol_type = other RNA

SEQ ID NO: 1308 - RNA, 100 nt, synthetic construct; identical to SEQ ID NO: 1305
  source 1..100: mol_type = other RNA

SEQ ID NO: 1309 - RNA, 100 nt, synthetic construct; identical to SEQ ID NO: 1305
  source 1..100: mol_type = other RNA

SEQ ID NO: 1310 - RNA, 100 nt, synthetic construct; identical to SEQ ID NO: 1305
  source 1..100: mol_type = other RNA

SEQ ID NO: 1311 - RNA, 100 nt, synthetic construct; identical to SEQ ID NO: 1305
  source 1..100: mol_type = other RNA

SEQ ID NO: 1312 - RNA, 100 nt, synthetic construct; identical to SEQ ID NO: 1305
  source 1..100: mol_type = other RNA

SEQ ID NO: 1313 - RNA, 100 nt, synthetic construct; identical to SEQ ID NO: 1305
  source 1..100: mol_type = other RNA

SEQ ID NO: 1314 - RNA, 100 nt, synthetic construct; identical to SEQ ID NO: 1305
  source 1..100: mol_type = other RNA

SEQ ID NO: 1315 - RNA, 100 nt, synthetic construct
  source 1..100: mol_type = other RNA
ggctgggggctggtggggaggttttagagctagaaatagcaagttaaaataaggctagtccgttatcaacttgaaaaagtggcaccgagtcggtgctttt

SEQ ID NO: 1316 - RNA, 100 nt, synthetic construct; identical to SEQ ID NO: 1315
  source 1..100: mol_type = other RNA

SEQ ID NO: 1317 - RNA, 100 nt, synthetic construct; identical to SEQ ID NO: 1315
  source 1..100: mol_type = other RNA

SEQ ID NO: 1318 - RNA, 100 nt, synthetic construct
  source 1..100: mol_type = other RNA
taaaaggctgggggctggtggttttagagctagaaatagcaagttaaaataaggctagtccgttatcaacttgaaaaagtggcaccgagtcggtgctttt

SEQ ID NO: 1319 - RNA, 100 nt, synthetic construct; identical to SEQ ID NO: 1318
  source 1..100: mol_type = other RNA

SEQ ID NO: 1320 - RNA, 100 nt, synthetic construct; identical to SEQ ID NO: 1318
  source 1..100: mol_type = other RNA

SEQ ID NO: 1321 - RNA, 100 nt, synthetic construct; identical to SEQ ID NO: 1318
  source 1..100: mol_type = other RNA

SEQ ID NO: 1322 - RNA, 100 nt, synthetic construct; identical to SEQ ID NO: 1318
  source 1..100: mol_type = other RNA

SEQ ID NO: 1323 - RNA, 100 nt, synthetic construct; identical to SEQ ID NO: 1318
  source 1..100: mol_type = other RNA

SEQ ID NO: 1324 - RNA, 100 nt, synthetic construct; identical to SEQ ID NO: 1318
  source 1..100: mol_type = other RNA

SEQ ID NO: 1325 - RNA, 100 nt, synthetic construct; identical to SEQ ID NO: 1318
  source 1..100: mol_type = other RNA

SEQ ID NO: 1326 - RNA, 100 nt, synthetic construct; identical to SEQ ID NO: 1318
  source 1..100: mol_type = other RNA

SEQ ID NO: 1327 - RNA, 100 nt, synthetic construct; identical to SEQ ID NO: 1318
  source 1..100: mol_type = other RNA

SEQ ID NO: 1328 - RNA, 100 nt, synthetic construct
  source 1..100: mol_type = other RNA
tataaaaggctgggggctgggttttagagctagaaatagcaagttaaaataaggctagtccgttatcaacttgaaaaagtggcaccgagtcggtgctttt

SEQ ID NO: 1329 - RNA, 100 nt, synthetic construct; identical to SEQ ID NO: 1328
  source 1..100: mol_type = other RNA

SEQ ID NO: 1330 - RNA, 100 nt, synthetic construct; identical to SEQ ID NO: 1328
  source 1..100: mol_type = other RNA

SEQ ID NO: 1331 - RNA, 100 nt, synthetic construct; identical to SEQ ID NO: 1328
  source 1..100: mol_type = other RNA

SEQ ID NO: 1332 - RNA, 100 nt, synthetic construct; identical to SEQ ID NO: 1328
  source 1..100: mol_type = other RNA

SEQ ID NO: 1333 - RNA, 100 nt, synthetic construct; identical to SEQ ID NO: 1328
  source 1..100: mol_type = other RNA

SEQ ID NO: 1334 - RNA, 100 nt, synthetic construct; identical to SEQ ID NO: 1328
  source 1..100: mol_type = other RNA

SEQ ID NO: 1335 - RNA, 100 nt, synthetic construct; identical to SEQ ID NO: 1328
  source 1..100: mol_type = other RNA

SEQ ID NO: 1336 - RNA, 100 nt, synthetic construct; identical to SEQ ID NO: 1328
  source 1..100: mol_type = other RNA

SEQ ID NO: 1337 - RNA, 100 nt, synthetic construct; identical to SEQ ID NO: 1328
  source 1..100: mol_type = other RNA

SEQ ID NO: 1338 - RNA, 119 nt, synthetic construct
  source 1..119: mol_type = other RNA
gttctgtcttttggtcaggacaaccgtctagctataagtgctgcagggtgtgagaaactcctattgctggacgatgtctcttacgaggcattagcactataaaaggctgggggctggtg

SEQ ID NO: 1339 - RNA, 119 nt, synthetic construct
  source 1..119: mol_type = other RNA
gttctgtcttttggtcaggacaaccgtctagctataagtgctgcagggtgtgagaaactcctattgctggacgatgtctcttacgaggcattagcactatacaatctgtgttctggcac

SEQ ID NO: 1340 - RNA, 100 nt, synthetic construct
  source 1..100: mol_type = other RNA
tgggggctggtggggagcaggttttagagctagaaatagcaagttaaaataaggctagtccgttatcaacttgaaaaagtggcaccgagtcggtgctttt

SEQ ID NO: 1341 - RNA, 100 nt, synthetic construct; identical to SEQ ID NO: 1340
  source 1..100: mol_type = other RNA

SEQ ID NO: 1342 - RNA, 100 nt, synthetic construct; identical to SEQ ID NO: 1340
  source 1..100: mol_type = other RNA

SEQ ID NO: 1343 - RNA, 100 nt, synthetic construct; identical to SEQ ID NO: 1340
  source 1..100: mol_type = other RNA

SEQ ID NO: 1344 - RNA, 100 nt, synthetic construct; identical to SEQ ID NO: 1340
  source 1..100: mol_type = other RNA

SEQ ID NO: 1345 - RNA, 100 nt, synthetic construct; identical to SEQ ID NO: 1340
  source 1..100: mol_type = other RNA

SEQ ID NO: 1346 - RNA, 100 nt, synthetic construct; identical to SEQ ID NO: 1340
  source 1..100: mol_type = other RNA

SEQ ID NO: 1347 - RNA, 100 nt, synthetic construct; identical to SEQ ID NO: 1340
  source 1..100: mol_type = other RNA

SEQ ID NO: 1348 - RNA, 100 nt, synthetic construct
  source 1..100: mol_type = other RNA
tgtataaaaggctgggggctgttttagagctagaaatagcaagttaaaataaggctagtccgttatcaacttgaaaaagtggcaccgagtcggtgctttt

SEQ ID NO: 1349 - RNA, 100 nt, synthetic construct; identical to SEQ ID NO: 1348
  source 1..100: mol_type = other RNA

SEQ ID NO: 1350 - RNA, 100 nt, synthetic construct; identical to SEQ ID NO: 1348
  source 1..100: mol_type = other RNA

SEQ ID NO: 1351 - RNA, 100 nt, synthetic construct; identical to SEQ ID NO: 1348
  source 1..100: mol_type = other RNA

SEQ ID NO: 1352 - RNA, 100 nt, synthetic construct; identical to SEQ ID NO: 1348
  source 1..100: mol_type = other RNA

SEQ ID NO: 1353 - RNA, 100 nt, synthetic construct
  source 1..100: mol_type = other RNA
ttatacaatctgtgttctgggttttagagctagaaatagcaagttaaaataaggctagtccgttatcaacttgaaaaagtggcaccgagtcggtgctttt

SEQ ID NO: 1354 - RNA, 100 nt, synthetic construct; identical to SEQ ID NO: 1353
  source 1..100: mol_type = other RNA

SEQ ID NO: 1355 - RNA, 100 nt, synthetic construct; identical to SEQ ID NO: 1353
  source 1..100: mol_type = other RNA

SEQ ID NO: 1356 - RNA, 100 nt, synthetic construct; identical to SEQ ID NO: 1353
  source 1..100: mol_type = other RNA

SEQ ID NO: 1357 - RNA, 100 nt, synthetic construct; identical to SEQ ID NO: 1353
  source 1..100: mol_type = other RNA

SEQ ID NO: 1358 - RNA, 100 nt, synthetic construct
  source 1..100: mol_type = other RNA
ttgtataaaaggctgggggcgttttagagctagaaatagcaagttaaaataaggctagtccgttatcaacttgaaaaagtggcaccgagtcggtgctttt

SEQ ID NO: 1359 - RNA, 100 nt, synthetic construct; identical to SEQ ID NO: 1358
  source 1..100: mol_type = other RNA

SEQ ID NO: 1360 - RNA, 100 nt, synthetic construct; identical to SEQ ID NO: 1358
  source 1..100: mol_type = other RNA

SEQ ID NO: 1361 - RNA, 100 nt, synthetic construct; identical to SEQ ID NO: 1358
  source 1..100: mol_type = other RNA

SEQ ID NO: 1362 - RNA, 100 nt, synthetic construct; identical to SEQ ID NO: 1358
  source 1..100: mol_type = other RNA

SEQ ID NO: 1363 - RNA, 100 nt, synthetic construct; identical to SEQ ID NO: 1358
  source 1..100: mol_type = other RNA

SEQ ID NO: 1364 - RNA, 100 nt, synthetic construct; identical to SEQ ID NO: 1358
  source 1..100: mol_type = other RNA

SEQ ID NO: 1365 - RNA, 100 nt, synthetic construct; identical to SEQ ID NO: 1358
  source 1..100: mol_type = other RNA

SEQ ID NO: 1366 - RNA, 100 nt, synthetic construct; identical to SEQ ID NO: 1358
  source 1..100: mol_type = other RNA

SEQ ID NO: 1367 - RNA, 100 nt, synthetic construct; identical to SEQ ID NO: 1358
  source 1..100: mol_type = other RNA

SEQ ID NO: 1368 - RNA, 100 nt, synthetic construct; identical to SEQ ID NO: 1358
  source 1..100: mol_type = other RNA

SEQ ID NO: 1369 - RNA, 100 nt, synthetic construct; identical to SEQ ID NO: 1358
  source 1..100: mol_type = other RNA

SEQ ID NO: 1370 - RNA, 100 nt, synthetic construct
  source 1..100: mol_type = other RNA
ttttatacaatctgtgttctgttttagagctagaaatagcaagttaaaataaggctagtccgttatcaacttgaaaaagtggcaccgagtcggtgctttt

SEQ ID NO: 1371 - RNA, 100 nt, synthetic construct; identical to SEQ ID NO: 1370
  source 1..100: mol_type = other RNA

SEQ ID NO: 1372 - RNA, 100 nt, synthetic construct; identical to SEQ ID NO: 1370
  source 1..100: mol_type = other RNA

SEQ ID NO: 1373 - RNA, 100 nt, synthetic construct; identical to SEQ ID NO: 1370
  source 1..100: mol_type = other RNA

SEQ ID NO: 1374 - RNA, 100 nt, synthetic construct; identical to SEQ ID NO: 1370
  source 1..100: mol_type = other RNA

SEQ ID NO: 1375 - RNA, 100 nt, synthetic construct; identical to SEQ ID NO: 1370
  source 1..100: mol_type = other RNA

SEQ ID NO: 1376 - RNA, 100 nt, synthetic construct; identical to SEQ ID NO: 1370
  source 1..100: mol_type = other RNA

SEQ ID NO: 1377 - RNA, 100 nt, synthetic construct; identical to SEQ ID NO: 1370
  source 1..100: mol_type = other RNA

SEQ ID NO: 1378 - RNA, 100 nt, synthetic construct; identical to SEQ ID NO: 1370
  source 1..100: mol_type = other RNA

SEQ ID NO: 1379 - RNA, 100 nt, synthetic construct; identical to SEQ ID NO: 1370
  source 1..100: mol_type = other RNA

SEQ ID NO: 1380 - RNA, 100 nt, synthetic construct
  source 1..100: mol_type = other RNA
aacgccatggggagcaatctgttttagagctagaaatagcaagttaaaataaggctagtccgttatcaacttgaaaaagtggcaccgagtcggtgctttt

SEQ ID NO: 1381 - RNA, 100 nt, synthetic construct; identical to SEQ ID NO: 1380
  source 1..100: mol_type = other RNA

SEQ ID NO: 1382 - RNA, 100 nt, synthetic construct
  source 1..100: mol_type = other RNA
acgccatggggagcaatctcgttttagagctagaaatagcaagttaaaataaggctagtccgttatcaacttgaaaaagtggcaccgagtcggtgctttt

SEQ ID NO: 1383 - RNA, 100 nt, synthetic construct; identical to SEQ ID NO: 1382
  source 1..100: mol_type = other RNA

SEQ ID NO: 1384 - RNA, 100 nt, synthetic construct; identical to SEQ ID NO: 1382
  source 1..100: mol_type = other RNA

SEQ ID NO: 1385 - RNA, 100 nt, synthetic construct; identical to SEQ ID NO: 1382
  source 1..100: mol_type = other RNA

SEQ ID NO: 1386 - RNA, 100 nt, synthetic construct; identical to SEQ ID NO: 1382
  source 1..100: mol_type = other RNA

SEQ ID NO: 1387 - RNA, 100 nt, synthetic construct; identical to SEQ ID NO: 1382
  source 1..100: mol_type = other RNA

SEQ ID NO: 1388 - RNA, 100 nt, synthetic construct
  source 1..100: mol_type = other RNA
agattgctccccatggcgttgttttagagctagaaatagcaagttaaaataaggctagtccgttatcaacttgaaaaagtggcaccgagtcggtgctttt

SEQ ID NO: 1389 - RNA, 119 nt, synthetic construct
  source 1..119: mol_type = other RNA
gttctgtcttttggtcaggacaaccgtctagctataagtgctgcagggtgtgagaaactcctattgctggacgatgtctcttacgaggcattagcaccaacgccatggggagcaatctc

SEQ ID NO: 1390 - RNA, 100 nt, synthetic construct
  source 1..100: mol_type = other RNA
ccatggcgttggaaggcagggttttagagctagaaatagcaagttaaaataaggctagtccgttatcaacttgaaaaagtggcaccgagtcggtgctttt

SEQ ID NO: 1391 - RNA, 100 nt, synthetic construct; identical to SEQ ID NO: 1390
  source 1..100: mol_type = other RNA

SEQ ID NO: 1392 - RNA, 100 nt, synthetic construct; identical to SEQ ID NO: 1390
  source 1..100: mol_type = other RNA

SEQ ID NO: 1393 - RNA, 100 nt, synthetic construct; identical to SEQ ID NO: 1390
  source 1..100: mol_type = other RNA

SEQ ID NO: 1394 - RNA, 100 nt, synthetic construct
  source 1..100: mol_type = other RNA
cccatggcgttggaaggcaggttttagagctagaaatagcaagttaaaataaggctagtccgttatcaacttgaaaaagtggcaccgagtcggtgctttt

SEQ ID NO: 1395 - RNA, 100 nt, synthetic construct; identical to SEQ ID NO: 1394
  source 1..100: mol_type = other RNA

SEQ ID NO: 1396 - RNA, 100 nt, synthetic construct; identical to SEQ ID NO: 1394
  source 1..100: mol_type = other RNA

SEQ ID NO: 1397 - RNA, 100 nt, synthetic construct; identical to SEQ ID NO: 1394
  source 1..100: mol_type = other RNA

SEQ ID NO: 1398 - RNA, 100 nt, synthetic construct
  source 1..100: mol_type = other RNA
ccccatggcgttggaaggcagttttagagctagaaatagcaagttaaaataaggctagtccgttatcaacttgaaaaagtggcaccgagtcggtgctttt

SEQ ID NO: 1399 - RNA, 100 nt, synthetic construct; identical to SEQ ID NO: 1398
  source 1..100: mol_type = other RNA

SEQ ID NO: 1400 - RNA, 100 nt, synthetic construct; identical to SEQ ID NO: 1398
  source 1..100: mol_type = other RNA

SEQ ID NO: 1401 - RNA, 100 nt, synthetic construct; identical to SEQ ID NO: 1398
  source 1..100: mol_type = other RNA

SEQ ID NO: 1402 - RNA, 100 nt, synthetic construct; identical to SEQ ID NO: 1398
  source 1..100: mol_type = other RNA

SEQ ID NO: 1403 - RNA, 100 nt, synthetic construct; identical to SEQ ID NO: 1398
  source 1..100: mol_type = other RNA

SEQ ID NO: 1404 - RNA, 100 nt, synthetic construct; identical to SEQ ID NO: 1398
  source 1..100: mol_type = other RNA

SEQ ID NO: 1405 - RNA, 100 nt, synthetic construct; identical to SEQ ID NO: 1398
  source 1..100: mol_type = other RNA

SEQ ID NO: 1406 - RNA, 100 nt, synthetic construct
  source 1..100: mol_type = other RNA
ctccccatggcgttggaagggttttagagctagaaatagcaagttaaaataaggctagtccgttatcaacttgaaaaagtggcaccgagtcggtgctttt

SEQ ID NO: 1407 - RNA, 100 nt, synthetic construct; identical to SEQ ID NO: 1406
  source 1..100: mol_type = other RNA

SEQ ID NO: 1408 - RNA, 100 nt, synthetic construct; identical to SEQ ID NO: 1406
  source 1..100: mol_type = other RNA

SEQ ID NO: 1409 - RNA, 119 nt, synthetic construct
  source 1..119: mol_type = other RNA
gttctgtcttttggtcaggacaaccgtctagctataagtgctgcagggtgtgagaaactcctattgctggacgatgtctcttacgaggcattagcacctccccatggcgttggaaggca

SEQ ID NO: 1410 - RNA, 100 nt, synthetic construct
  source 1..100: mol_type = other RNA
gagattgctccccatggcgtgttttagagctagaaatagcaagttaaaataaggctagtccgttatcaacttgaaaaagtggcaccgagtcggtgctttt

SEQ ID NO: 1411 - RNA, 100 nt, synthetic construct
  source 1..100: mol_type = other RNA
tccccatggcgttggaaggcgttttagagctagaaatagcaagttaaaataaggctagtccgttatcaacttgaaaaagtggcaccgagtcggtgctttt

SEQ ID NO: 1412 - RNA, 100 nt, synthetic construct; identical to SEQ ID NO: 1411
  source 1..100: mol_type = other RNA

SEQ ID NO: 1413 - RNA, 100 nt, synthetic construct; identical to SEQ ID NO: 1411
  source 1..100: mol_type = other RNA

SEQ ID NO: 1414 - RNA, 100 nt, synthetic construct; identical to SEQ ID NO: 1411
  source 1..100: mol_type = other RNA

SEQ ID NO: 1415 - RNA, 100 nt, synthetic construct; identical to SEQ ID NO: 1411
  source 1..100: mol_type = other RNA

SEQ ID NO: 1416 - RNA, 100 nt, synthetic construct; identical to SEQ ID NO: 1411
  source 1..100: mol_type = other RNA

SEQ ID NO: 1417 - RNA, 100 nt, synthetic construct; identical to SEQ ID NO: 1411
  source 1..100: mol_type = other RNA

SEQ ID NO: 1418 - RNA, 100 nt, synthetic construct; identical to SEQ ID NO: 1411
  source 1..100: mol_type = other RNA

SEQ ID NO: 1419 - RNA, 100 nt, synthetic construct; identical to SEQ ID NO: 1411
  source 1..100: mol_type = other RNA

SEQ ID NO: 1420 - RNA, 100 nt, synthetic construct; identical to SEQ ID NO: 1411
  source 1..100: mol_type = other RNA

SEQ ID NO: 1421 - RNA, 100 nt, synthetic construct; identical to SEQ ID NO: 1411
  source 1..100: mol_type = other RNA

SEQ ID NO: 1422 - RNA, 100 nt, synthetic construct
  source 1..100: mol_type = other RNA
tgctccccatggcgttggaagttttagagctagaaatagcaagttaaaataaggctagtccgttatcaacttgaaaaagtggcaccgagtcggtgctttt

SEQ ID NO: 1423 - RNA, 100 nt, synthetic construct; identical to SEQ ID NO: 1422
  source 1..100: mol_type = other RNA

SEQ ID NO: 1424 - RNA, 100 nt, synthetic construct; identical to SEQ ID NO: 1422
  source 1..100: mol_type = other RNA

SEQ ID NO: 1425 - RNA, 100 nt, synthetic construct; identical to SEQ ID NO: 1422
  source 1..100: mol_type = other RNA

SEQ ID NO: 1426 - RNA, 100 nt, synthetic construct; identical to SEQ ID NO: 1422
  source 1..100: mol_type = other RNA

SEQ ID NO: 1427 - RNA, 100 nt, synthetic construct; identical to SEQ ID NO: 1422
  source 1..100: mol_type = other RNA

SEQ ID NO: 1428 - RNA, 100 nt, synthetic construct; identical to SEQ ID NO: 1422
  source 1..100: mol_type = other RNA

SEQ ID NO: 1429 - RNA, 100 nt, synthetic construct; identical to SEQ ID NO: 1422
  source 1..100: mol_type = other RNA

SEQ ID NO: 1430 - RNA, 100 nt, synthetic construct; identical to SEQ ID NO: 1422
  source 1..100: mol_type = other RNA

SEQ ID NO: 1431 - RNA, 100 nt, synthetic construct
  source 1..100: mol_type = other RNA
ttgctccccatggcgttggagttttagagctagaaatagcaagttaaaataaggctagtccgttatcaacttgaaaaagtggcaccgagtcggtgctttt

SEQ ID NO: 1432 - RNA, 100 nt, synthetic construct; identical to SEQ ID NO: 1431
  source 1..100: mol_type = other RNA

SEQ ID NO: 1433 - RNA, 100 nt, synthetic construct; identical to SEQ ID NO: 1431
  source 1..100: mol_type = other RNA

SEQ ID NO: 1434 - RNA, 100 nt, synthetic construct; identical to SEQ ID NO: 1431
  source 1..100: mol_type = other RNA

SEQ ID NO: 1435 - RNA, 100 nt, synthetic construct; identical to SEQ ID NO: 1431
  source 1..100: mol_type = other RNA

SEQ ID NO: 1436 - RNA, 100 nt, synthetic construct; identical to SEQ ID NO: 1431
  source 1..100: mol_type = other RNA

SEQ ID NO: 1437 - RNA, 100 nt, synthetic construct; identical to SEQ ID NO: 1431
  source 1..100: mol_type = other RNA

SEQ ID NO: 1438 - RNA, 100 nt, synthetic construct; identical to SEQ ID NO: 1240
  source 1..100: mol_type = other RNA

SEQ ID NO: 1439 - RNA, 100 nt, synthetic construct; identical to SEQ ID NO: 1172
  source 1..100: mol_type = other RNA

SEQ ID NO: 1440 - RNA, 100 nt, synthetic construct; identical to SEQ ID NO: 1230
  source 1..100: mol_type = other RNA

SEQ ID NO: 1441 - RNA, 100 nt, synthetic construct; identical to SEQ ID NO: 1182
  source 1..100: mol_type = other RNA

SEQ ID NO: 1442 - RNA, 100 nt, synthetic construct; identical to SEQ ID NO: 1251
  source 1..100: mol_type = other RNA

SEQ ID NO: 1443 - RNA, 100 nt, synthetic construct; identical to SEQ ID NO: 1328
  source 1..100: mol_type = other RNA

SEQ ID NO: 1444 - RNA, 100 nt, synthetic construct; identical to SEQ ID NO: 1212
  source 1..100: mol_type = other RNA

SEQ ID NO: 1445 - RNA, 100 nt, synthetic construct; identical to SEQ ID NO: 1318
  source 1..100: mol_type = other RNA

SEQ ID NO: 1446 - RNA, 100 nt, synthetic construct; identical to SEQ ID NO: 1294
  source 1..100: mol_type = other RNA

SEQ ID NO: 1447 - RNA, 100 nt, synthetic construct; identical to SEQ ID NO: 1154
  source 1..100: mol_type = other RNA

SEQ ID NO: 1448 - RNA, 100 nt, synthetic construct; identical to SEQ ID NO: 1132
  source 1..100: mol_type = other RNA

SEQ ID NO: 1449 - RNA, 100 nt, synthetic construct; identical to SEQ ID NO: 1192
  source 1..100: mol_type = other RNA

SEQ ID NO: 1450 - RNA, 100 nt, synthetic construct; identical to SEQ ID NO: 1221
  source 1..100: mol_type = other RNA

SEQ ID NO: 1451 - RNA, 109 nt, synthetic construct; identical to SEQ ID NO: 1211
  source 1..109: mol_type = other RNA

SEQ ID NO: 1452 - RNA, 109 nt, synthetic construct; identical to SEQ ID NO: 1267
  source 1..109: mol_type = other RNA

SEQ ID NO: 1453 - RNA, 100 nt, synthetic construct; identical to SEQ ID NO: 1422
  source 1..100: mol_type = other RNA

SEQ ID NO: 1454 - RNA, 100 nt, synthetic construct; identical to SEQ ID NO: 1431
  source 1..100: mol_type = other RNA

SEQ ID NO: 1455 - RNA, 100 nt, synthetic construct; identical to SEQ ID NO: 1410
  source 1..100: mol_type = other RNA

SEQ ID NO: 1456 - RNA, 100 nt, synthetic construct; identical to SEQ ID NO: 1398
  source 1..100: mol_type = other RNA

SEQ ID NO: 1457 - RNA, 100 nt, synthetic construct; identical to SEQ ID NO: 1390
  source 1..100: mol_type = other RNA

SEQ ID NO: 1458 - RNA, 100 nt, synthetic construct; identical to SEQ ID NO: 1388
  source 1..100: mol_type = other RNA

SEQ ID NO: 1459 - RNA, 100 nt, synthetic construct; identical to SEQ ID NO: 449
  source 1..100: mol_type = other RNA

SEQ ID NO: 1460 - RNA, 100 nt, synthetic construct; identical to SEQ ID NO: 449
  source 1..100: mol_type = other RNA

SEQ ID NO: 1461 - RNA, 100 nt, synthetic construct; identical to SEQ ID NO: 449
  source 1..100: mol_type = other RNA

SEQ ID NO: 1462 - RNA, 100 nt, synthetic construct; identical to SEQ ID NO: 449
  source 1..100: mol_type = other RNA

SEQ ID NO: 1463 - protein, 19 aa, synthetic construct
CKRTADGSEFESPKKKRKV

SEQ ID NO: 1464 - RNA, 106 nt, synthetic construct
  source 1..106: mol_type = other RNA
cctcagatgtctatgtgtttgttttagagccggcggaaacgccggcaagttaaaataaggctagtccgttatcaacttgaaaaagtggcaccgagtcggtgctttt

SEQ ID NO: 1465 - RNA, 106 nt, synthetic construct; identical to SEQ ID NO: 1464
  source 1..106: mol_type = other RNA

SEQ ID NO: 1466 - RNA, 106 nt, synthetic construct; identical to SEQ ID NO: 1464
  source 1..106: mol_type = other RNA

SEQ ID NO: 1467 - RNA, 100 nt, synthetic construct; identical to SEQ ID NO: 454
  source 1..100: mol_type = other RNA

SEQ ID NO: 1468 - RNA, 100 nt, synthetic construct; identical to SEQ ID NO: 454
  source 1..100: mol_type = other RNA

SEQ ID NO: 1469 - RNA, 100 nt, synthetic construct; identical to SEQ ID NO: 454
  source 1..100: mol_type = other RNA

SEQ ID NO: 1470 - RNA, 100 nt, synthetic construct; identical to SEQ ID NO: 454
  source 1..100: mol_type = other RNA

SEQ ID NO: 1471 - RNA, 106 nt, synthetic construct
  source 1..106: mol_type = other RNA
tctcacctctgcaagtattggttttagagccggcggaaacgccggcaagttaaaataaggctagtccgttatcaacttgaaaaagtggcaccgagtcggtgctttt

SEQ ID NO: 1472 - RNA, 106 nt, synthetic construct; identical to SEQ ID NO: 1471
  source 1..106: mol_type = other RNA

SEQ ID NO: 1473 - RNA, 106 nt, synthetic construct
  source 1..106: mol_type = other RNA
tgtcacctctgcaagtattggttttagagccggcggaaacgccggcaagttaaaataaggctagtccgttatcaacttgaaaaagtggcaccgagtcggtgctttt

SEQ ID NO: 1474 - RNA, 101 nt, synthetic construct; identical to SEQ ID NO: 460
  source 1..101: mol_type = other RNA

SEQ ID NO: 1475 - RNA, 101 nt, synthetic construct; identical to SEQ ID NO: 460
  source 1..101: mol_type = other RNA

SEQ ID NO: 1476 - RNA, 101 nt, synthetic construct; identical to SEQ ID NO: 460
  source 1..101: mol_type = other RNA

SEQ ID NO: 1477 - RNA, 101 nt, synthetic construct; identical to SEQ ID NO: 460
  source 1..101: mol_type = other RNA

SEQ ID NO: 1478 - RNA, 107 nt, synthetic construct
  source 1..107: mol_type = other RNA
tgcttacaatgactgagatctgttttagagccggcggaaacgccggcaagttaaaataaggctagtccgttatcaacttgaaaaagtggcaccgagtcggtgctttt

SEQ ID NO: 1479 - RNA, 107 nt, synthetic construct; identical to SEQ ID NO: 1478
  source 1..107: mol_type = other RNA

SEQ ID NO: 1480 - RNA, 107 nt, synthetic construct; identical to SEQ ID NO: 1478
  source 1..107: mol_type = other RNA

SEQ ID NO: 1481 - RNA, 101 nt, synthetic construct; identical to SEQ ID NO: 465
  source 1..101: mol_type = other RNA

SEQ ID NO: 1482 - RNA, 101 nt, synthetic construct; identical to SEQ ID NO: 465
  source 1..101: mol_type = other RNA

SEQ ID NO: 1483 - DNA, 19 bp, synthetic construct
  source 1..19: mol_type = other DNA
ctcagatgtctatgtgttt

SEQ ID NO: 1484 - DNA, 20 bp, synthetic construct
  source 1..20: mol_type = other DNA
cctcagatgtctatgtgttt

SEQ ID NO: 1485 - DNA, 21 bp, synthetic construct
  source 1..21: mol_type = other DNA
ccctcagatgtctatgtgttt

SEQ ID NO: 1486 - DNA, 22 bp, synthetic construct
  source 1..22: mol_type = other DNA
tccctcagatgtctatgtgttt

SEQ ID NO: 1487 - DNA, 23 bp, synthetic construct
  source 1..23: mol_type = other DNA
atccctcagatgtctatgtgttt

SEQ ID NO: 1488 - DNA, 19 bp, synthetic construct
  source 1..19: mol_type = other DNA
ctcacctctgcaagtattg

SEQ ID NO: 1489 - DNA, 20 bp, synthetic construct
  source 1..20: mol_type = other DNA
tctcacctctgcaagtattg

SEQ ID NO: 1490 - DNA, 21 bp, synthetic construct
  source 1..21: mol_type = other DNA
ctctcacctctgcaagtattg

SEQ ID NO: 1491 - DNA, 22 bp, synthetic construct
  source 1..22: mol_type = other DNA
tctctcacctctgcaagtattg

SEQ ID NO: 1492 - DNA, 23 bp, synthetic construct
  source 1..23: mol_type = other DNA
ttctctcacctctgcaagtattg

SEQ ID NO: 1493 - DNA, 19 bp, synthetic construct
  source 1..19: mol_type = other DNA
cttacaatgactgagatct

SEQ ID NO: 1494 - DNA, 20 bp, synthetic construct
  source 1..20: mol_type = other DNA
gcttacaatgactgagatct

SEQ ID NO: 1495 - DNA, 21 bp, synthetic construct
  source 1..21: mol_type = other DNA
tgcttacaatgactgagatct

SEQ ID NO: 1496 - DNA, 22 bp, synthetic construct
  source 1..22: mol_type = other DNA
gtgcttacaatgactgagatct

SEQ ID NO: 1497 - DNA, 23 bp, synthetic construct
  source 1..23: mol_type = other DNA
tgtgcttacaatgactgagatct

SEQ ID NO: 1498 - DNA, 19 bp, synthetic construct
  source 1..19: mol_type = other DNA
cttacagtgactgagatct

SEQ ID NO: 1499 - DNA, 20 bp, synthetic construct
  source 1..20: mol_type = other DNA
gcttacagtgactgagatct

SEQ ID NO: 1500 - DNA, 21 bp, synthetic construct
  source 1..21: mol_type = other DNA
tgcttacagtgactgagatct

SEQ ID NO: 1501 - DNA, 22 bp, synthetic construct
  source 1..22: mol_type = other DNA
gtgcttacagtgactgagatct

SEQ ID NO: 1502 - DNA, 23 bp, synthetic construct
  source 1..23: mol_type = other DNA
tgtgcttacagtgactgagatct

SEQ ID NO: 1503 - DNA, 22 bp, synthetic construct
  source 1..22: mol_type = other DNA
ctcagatgtctatgtgtttggg

SEQ ID NO: 1504 - DNA, 23 bp, synthetic construct
  source 1..23: mol_type = other DNA
cctcagatgtctatgtgtttggg

SEQ ID NO: 1505 - DNA, 24 bp, synthetic construct
  source 1..24: mol_type = other DNA
ccctcagatgtctatgtgtttggg

SEQ ID NO: 1506 - DNA, 25 bp, synthetic construct
  source 1..25: mol_type = other DNA
tccctcagatgtctatgtgtttggg

SEQ ID NO: 1507 - DNA, 26 bp, synthetic construct
  source 1..26: mol_type = other DNA
atccctcagatgtctatgtgtttggg

SEQ ID NO: 1508 - DNA, 22 bp, synthetic construct
  source 1..22: mol_type = other DNA
ctcacctctgcaagtattgggg

SEQ ID NO: 1509 - DNA, 23 bp, synthetic construct
  source 1..23: mol_type = other DNA
tctcacctctgcaagtattgggg

SEQ ID NO: 1510 - DNA, 24 bp, synthetic construct
  source 1..24: mol_type = other DNA
ctctcacctctgcaagtattgggg

SEQ ID NO: 1511 - DNA, 25 bp, synthetic construct
  source 1..25: mol_type = other DNA
tctctcacctctgcaagtattgggg

SEQ ID NO: 1512 - DNA, 26 bp, synthetic construct
  source 1..26: mol_type = other DNA
ttctctcacctctgcaagtattgggg

SEQ ID NO: 1513 - DNA, 22 bp, synthetic construct
  source 1..22: mol_type = other DNA
cttacaatgactgagatcttgg

SEQ ID NO: 1514 - DNA, 23 bp, synthetic construct
  source 1..23: mol_type = other DNA
gcttacaatgactgagatcttgg

SEQ ID NO: 1515 - DNA, 24 bp, synthetic construct
  source 1..24: mol_type = other DNA
tgcttacaatgactgagatcttgg

SEQ ID NO: 1516 - DNA, 25 bp, synthetic construct
  source 1..25: mol_type = other DNA
gtgcttacaatgactgagatcttgg

SEQ ID NO: 1517 - DNA, 26 bp, synthetic construct
  source 1..26: mol_type = other DNA
tgtgcttacaatgactgagatcttgg

SEQ ID NO: 1518 - DNA, 22 bp, synthetic construct
  source 1..22: mol_type = other DNA
cttacagtgactgagatcttgg

SEQ ID NO: 1519 - DNA, 23 bp, synthetic construct
  source 1..23: mol_type = other DNA
gcttacagtgactgagatcttgg

SEQ ID NO: 1520 - DNA, 24 bp, synthetic construct
  source 1..24: mol_type = other DNA
tgcttacagtgactgagatcttgg

SEQ ID NO: 1521 - DNA, 25 bp, synthetic construct
  source 1..25: mol_type = other DNA
gtgcttacagtgactgagatcttgg

SEQ ID NO: 1522 - DNA, 26 bp, synthetic construct
  source 1..26: mol_type = other DNA
tgtgcttacagtgactgagatcttgg

SEQ ID NO: 1523 - RNA, 19 nt, synthetic construct
  source 1..19: mol_type = other RNA
ctcagatgtctatgtgttt

SEQ ID NO: 1524 - RNA, 20 nt, synthetic construct
  source 1..20: mol_type = other RNA
cctcagatgtctatgtgttt

SEQ ID NO: 1525 - RNA, 21 nt, synthetic construct
  source 1..21: mol_type = other RNA
ccctcagatgtctatgtgttt

SEQ ID NO: 1526 - RNA, 22 nt, synthetic construct
  source 1..22: mol_type = other RNA
tccctcagatgtctatgtgttt

SEQ ID NO: 1527 - RNA, 23 nt, synthetic construct
  source 1..23: mol_type = other RNA
atccctcagatgtctatgtgttt

SEQ ID NO: 1528 - RNA, 19 nt, synthetic construct
  source 1..19: mol_type = other RNA
ctcacctctgcaagtattg

SEQ ID NO: 1529 - RNA, 20 nt, synthetic construct
  source 1..20: mol_type = other RNA
tctcacctctgcaagtattg

SEQ ID NO: 1530 - RNA, 21 nt, synthetic construct
  source 1..21: mol_type = other RNA
ctctcacctctgcaagtattg

SEQ ID NO: 1531 - RNA, 22 nt, synthetic construct
  source 1..22: mol_type = other RNA
tctctcacctctgcaagtattg

SEQ ID NO: 1532 - RNA, 23 nt, synthetic construct
  source 1..23: mol_type = other RNA
ttctctcacctctgcaagtattg

SEQ ID NO: 1533 - RNA, 19 nt, synthetic construct
  source 1..19: mol_type = other RNA
cttacaatgactgagatct

SEQ ID NO: 1534 - RNA, 20 nt, synthetic construct
  source 1..20: mol_type = other RNA
gcttacaatgactgagatct

SEQ ID NO: 1535 - RNA, 21 nt, synthetic construct
  source 1..21: mol_type = other RNA
tgcttacaatgactgagatct

SEQ ID NO: 1536 - RNA, 22 nt, synthetic construct
  source 1..22: mol_type = other RNA
gtgcttacaatgactgagatct

SEQ ID NO: 1537 - RNA, 23 nt, synthetic construct
  source 1..23: mol_type = other RNA
tgtgcttacaatgactgagatct

SEQ ID NO: 1538 - RNA, 19 nt, synthetic construct
  source 1..19: mol_type = other RNA
cttacagtgactgagatct

SEQ ID NO: 1539 - RNA, 20 nt, synthetic construct
  source 1..20: mol_type = other RNA
gcttacagtgactgagatct

SEQ ID NO: 1540 - RNA, 21 nt, synthetic construct
  source 1..21: mol_type = other RNA
tgcttacagtgactgagatct

SEQ ID NO: 1541 - RNA, 22 nt, synthetic construct
  source 1..22: mol_type = other RNA
gtgcttacagtgactgagatct

SEQ ID NO: 1542 - RNA, 23 nt, synthetic construct
  source 1..23: mol_type = other RNA
tgtgcttacagtgactgagatct

SEQ ID NO: 1543-1742 - skipped (200 entries)

SEQ ID NO: 1743 - DNA, 20 bp, synthetic construct
  source 1..20: mol_type = other DNA
ctgcaggattgcacaacatg

SEQ ID NO: 1744 - DNA, 20 bp, synthetic construct
  source 1..20: mol_type = other DNA
ataggcccatttgtctcccc

SEQ ID NO: 1745 - DNA, 20 bp, synthetic construct
  source 1..20: mol_type = other DNA
ctctgcaggttggtgtaatc

SEQ ID NO: 1746 - DNA, 20 bp, synthetic construct
  source 1..20: mol_type = other DNA
acgctctcacctgatagtct

SEQ ID NO: 1747 - DNA, 20 bp, synthetic construct
  source 1..20: mol_type = other DNA
cttacaatgactgagatctt

SEQ ID NO: 1748 - DNA, 20 bp, synthetic construct
  source 1..20: mol_type = other DNA
tcacctccgttgtcacagat

SEQ ID NO: 1749 - DNA, 20 bp, synthetic construct
  source 1..20: mol_type = other DNA
tcgcttacctccagacaaga

SEQ ID NO: 1750 - DNA, 20 bp, synthetic construct
  source 1..20: mol_type = other DNA
cacccacaggtggcaagtta

SEQ ID NO: 1751 - DNA, 20 bp, synthetic construct
  source 1..20: mol_type = other DNA
acagaccacaagttgaagtc

SEQ ID NO: 1752 - DNA, 20 bp, synthetic construct
  source 1..20: mol_type = other DNA
tctgcaggattgcacaacat

SEQ ID NO: 1753 - DNA, 20 bp, synthetic construct
  source 1..20: mol_type = other DNA
gcaggattgcacaacatggg

SEQ ID NO: 1754 - DNA, 20 bp, synthetic construct
  source 1..20: mol_type = other DNA
ccctcagatgtctatgtgtt

SEQ ID NO: 1755 - DNA, 20 bp, synthetic construct
  source 1..20: mol_type = other DNA
cctcagatgtctatgtgttt

SEQ ID NO: 1756 - DNA, 20 bp, synthetic construct
  source 1..20: mol_type = other DNA
ctcagatgtctatgtgtttg

SEQ ID NO: 1757 - DNA, 20 bp, synthetic construct
  source 1..20: mol_type = other DNA
gtgtccccagcgcccttcaa

SEQ ID NO: 1758 - DNA, 20 bp, synthetic construct
  source 1..20: mol_type = other DNA
tgtccccagcgcccttcaaa

SEQ ID NO: 1759 - DNA, 20 bp, synthetic construct
  source 1..20: mol_type = other DNA
ctacttcaggaggggagaag

SEQ ID NO: 1760 - DNA, 20 bp, synthetic construct
  source 1..20: mol_type = other DNA
tacttcaggaggggagaagc

SEQ ID NO: 1761 - DNA, 20 bp, synthetic construct
  source 1..20: mol_type = other DNA
ctccttgcaggtgattctgg

SEQ ID NO: 1762 - DNA, 20 bp, synthetic construct
  source 1..20: mol_type = other DNA
tgcaggttggtgtaatcagc

SEQ ID NO: 1763 - DNA, 20 bp, synthetic construct
  source 1..20: mol_type = other DNA
gcaggttggtgtaatcagct

SEQ ID NO: 1764 - DNA, 20 bp, synthetic construct
  source 1..20: mol_type = other DNA
tctcacctctgcaagtattg

SEQ ID NO: 1765 - DNA, 20 bp, synthetic construct
  source 1..20: mol_type = other DNA
cttactttgttgctggcaag

SEQ ID NO: 1766 - DNA, 20 bp, synthetic construct
  source 1..20: mol_type = other DNA
gcttacaatgactgagatct

SEQ ID NO: 1767 - DNA, 20 bp, synthetic construct
  source 1..20: mol_type = other DNA
tcacccagataatcctccct

SEQ ID NO: 1768 - DNA, 20 bp, synthetic construct
  source 1..20: mol_type = other DNA
ccttctgaccatcagtcatg

SEQ ID NO: 1769 - DNA, 20 bp, synthetic construct
  source 1..20: mol_type = other DNA
caaaggtcaccttggcagga

SEQ ID NO: 1770 - DNA, 20 bp, synthetic construct
  source 1..20: mol_type = other DNA
ctcgcttacctccagacaag

SEQ ID NO: 1771 - DNA, 20 bp, synthetic construct
  source 1..20: mol_type = other DNA
tcaaagcaatccactgtcca

SEQ ID NO: 1772 - DNA, 20 bp, synthetic construct
  source 1..20: mol_type = other DNA
ctcccagactccttcatgta

SEQ ID NO: 1773 - DNA, 20 bp, synthetic construct
  source 1..20: mol_type = other DNA
cccaggggaacaacagaagc

SEQ ID NO: 1774 - DNA, 20 bp, synthetic construct
  source 1..20: mol_type = other DNA
acaggtggcaagttatggtg

SEQ ID NO: 1775 - DNA, 20 bp, synthetic construct
  source 1..20: mol_type = other DNA
gccagatgaaagccagtctc

SEQ ID NO: 1776 - DNA, 20 bp, synthetic construct
  source 1..20: mol_type = other DNA
gtccccagcgcccttcaaag

SEQ ID NO: 1777 - DNA, 20 bp, synthetic construct
  source 1..20: mol_type = other DNA
tacagaaaggcagctgtgag

SEQ ID NO: 1778 - DNA, 20 bp, synthetic construct
  source 1..20: mol_type = other DNA
gaggactcacttgaatgaaa

SEQ ID NO: 1779 - DNA, 20 bp, synthetic construct
  source 1..20: mol_type = other DNA
tctcaccttatccccattct

SEQ ID NO: 1780 - DNA, 20 bp, synthetic construct
  source 1..20: mol_type = other DNA
atccttacctacgctgacct

SEQ ID NO: 1781 - DNA, 20 bp, synthetic construct
  source 1..20: mol_type = other DNA
ttacctacgctgaccttgat

SEQ ID NO: 1782 - DNA, 20 bp, synthetic construct
  source 1..20: mol_type = other DNA
ctccctaccgatcatttggt

SEQ ID NO: 1783 - DNA, 20 bp, synthetic construct
  source 1..20: mol_type = other DNA
ctgaccatcagtcatgagga

SEQ ID NO: 1784 - DNA, 20 bp, synthetic construct
  source 1..20: mol_type = other DNA
cttctcacctccgttgtcac

SEQ ID NO: 1785 - DNA, 21 bp, synthetic construct
  source 1..21: mol_type = other DNA
tccctcagatgtctatgtgtt

SEQ ID NO: 1786 - DNA, 21 bp, synthetic construct
  source 1..21: mol_type = other DNA
ctgccagatgaaagccagtct

SEQ ID NO: 1787 - DNA, 21 bp, synthetic construct
  source 1..21: mol_type = other DNA
ttctctcacctctgcaagtat

SEQ ID NO: 1788 - DNA, 21 bp, synthetic construct
  source 1..21: mol_type = other DNA
ccttacctacgctgaccttga

SEQ ID NO: 1789 - DNA, 21 bp, synthetic construct
  source 1..21: mol_type = other DNA
actcacccagataatcctccc

SEQ ID NO: 1790 - DNA, 21 bp, synthetic construct
  source 1..21: mol_type = other DNA
tcccttctgaccatcagtcat

SEQ ID NO: 1791 - DNA, 21 bp, synthetic construct
  source 1..21: mol_type = other DNA
cttcaggtgtgaccaccactc

SEQ ID NO: 1792 - DNA, 21 bp, synthetic construct
  source 1..21: mol_type = other DNA
ccctctccacagaccacaagt

SEQ ID NO: 1793 - DNA, 21 bp, synthetic construct
  source 1..21: mol_type = other DNA
ctacagaaaggcagctgtgag

SEQ ID NO: 1794 - DNA, 21 bp, synthetic construct
  source 1..21: mol_type = other DNA
gtatgtcttactttgttgctg

SEQ ID NO: 1795 - DNA, 21 bp, synthetic construct
  source 1..21: mol_type = other DNA
tgtcttactttgttgctggca

SEQ ID NO: 1796 - DNA, 21 bp, synthetic construct
  source 1..21: mol_type = other DNA
tgcatccttacctacgctgac

SEQ ID NO: 1797 - DNA, 21 bp, synthetic construct
  source 1..21: mol_type = other DNA
ggattctgtgcttacaatgac

SEQ ID NO: 1798 - DNA, 21 bp, synthetic construct
  source 1..21: mol_type = other DNA
cttgtatctccctaccgatca

SEQ ID NO: 1799 - DNA, 21 bp, synthetic construct
  source 1..21: mol_type = other DNA
cttctgaccatcagtcatgag

SEQ ID NO: 1800 - DNA, 21 bp, synthetic construct
  source 1..21: mol_type = other DNA
ccctaacctctgaccttcata

SEQ ID NO: 1801 - DNA, 21 bp, synthetic construct
  source 1..21: mol_type = other DNA
aggaggattccaccttctcaa

SEQ ID NO: 1802 - DNA, 21 bp, synthetic construct
  source 1..21: mol_type = other DNA
atgcttctcacctccgttgtc

SEQ ID NO: 1803 - DNA, 21 bp, synthetic construct
  source 1..21: mol_type = other DNA
ttctccaagagggccaggcac

SEQ ID NO: 1804 - DNA, 21 bp, synthetic construct
  source 1..21: mol_type = other DNA
accaaaagactgtcaggaagg

SEQ ID NO: 1805 - DNA, 21 bp, synthetic construct
  source 1..21: mol_type = other DNA
acctgccaagtgaatggccga

SEQ ID NO: 1806 - DNA, 21 bp, synthetic construct
  source 1..21: mol_type = other DNA
gagcaacatgtgttcaaagtc

SEQ ID NO: 1807 - DNA, 21 bp, synthetic construct
  source 1..21: mol_type = other DNA
tacaccaacctgcagaggcag

SEQ ID NO: 1808 - DNA, 21 bp, synthetic construct
  source 1..21: mol_type = other DNA
ggctttcatctggcagagaag

SEQ ID NO: 1809 - DNA, 21 bp, synthetic construct
  source 1..21: mol_type = other DNA
gacatctgagggataaaaagg

SEQ ID NO: 1810 - DNA, 21 bp, synthetic construct
  source 1..21: mol_type = other DNA
tgttgttcccctgggtgccag

SEQ ID NO: 1811 - DNA, 21 bp, synthetic construct
  source 1..21: mol_type = other DNA
atcgcacctgccaagtgaatg

SEQ ID NO: 1812 - DNA, 21 bp, synthetic construct
  source 1..21: mol_type = other DNA
tggccgatggagtgggcagac

SEQ ID NO: 1813 - DNA, 21 bp, synthetic construct
  source 1..21: mol_type = other DNA
tcccagcggcgaacgtgtcag

SEQ ID NO: 1814 - DNA, 21 bp, synthetic construct
  source 1..21: mol_type = other DNA
cccaggggaacaacagaagcg

SEQ ID NO: 1815 - DNA, 21 bp, synthetic construct
  source 1..21: mol_type = other DNA
gtcacgaagcagctcaatgaa

SEQ ID NO: 1816 - DNA, 21 bp, synthetic construct
  source 1..21: mol_type = other DNA
ggccctccaggcagtgtacag

SEQ ID NO: 1817 - DNA, 21 bp, synthetic construct
  source 1..21: mol_type = other DNA
tttctaccaaatgatcggtag

SEQ ID NO: 1818 - DNA, 21 bp, synthetic construct
  source 1..21: mol_type = other DNA
gcaaccatggcaggccaagat

SEQ ID NO: 1819 - DNA, 21 bp, synthetic construct
  source 1..21: mol_type = other DNA
tcagccagggcagcacttgaa

SEQ ID NO: 1820 - DNA, 21 bp, synthetic construct
  source 1..21: mol_type = other DNA
cttactttgttgctggcaagt

SEQ ID NO: 1821 - DNA, 21 bp, synthetic construct
  source 1..21: mol_type = other DNA
ctcccctcctgaagtaggaga

SEQ ID NO: 1822 - DNA, 21 bp, synthetic construct
  source 1..21: mol_type = other DNA
tttgaagggcgctggggacac

SEQ ID NO: 1823 - DNA, 21 bp, synthetic construct
  source 1..21: mol_type = other DNA
tcttggcctgccatggttgct

SEQ ID NO: 1824 - DNA, 21 bp, synthetic construct
  source 1..21: mol_type = other DNA
tggcctgccatggttgcttgt

SEQ ID NO: 1825 - DNA, 21 bp, synthetic construct
  source 1..21: mol_type = other DNA
atgaaggagtctgggagagtc

SEQ ID NO: 1826 - DNA, 21 bp, synthetic construct
  source 1..21: mol_type = other DNA
ggagtctgggagagtcagaaa

SEQ ID NO: 1827 - DNA, 21 bp, synthetic construct
  source 1..21: mol_type = other DNA
cgctgcagaggtatgagacat

SEQ ID NO: 1828 - DNA, 21 bp, synthetic construct
  source 1..21: mol_type = other DNA
actccatcggccattcacttg

SEQ ID NO: 1829 - DNA, 21 bp, synthetic construct
  source 1..21: mol_type = other DNA
ggggccagtattccccgttct

SEQ ID NO: 1830 - DNA, 21 bp, synthetic construct
  source 1..21: mol_type = other DNA
ggattgctttgagaagggggg

SEQ ID NO: 1831 - DNA, 21 bp, synthetic construct
  source 1..21: mol_type = other DNA
ttcagggtgctccaggacccc

SEQ ID NO: 1832 - DNA, 21 bp, synthetic construct
  source 1..21: mol_type = other DNA
gctccaggaccccgtagatct

SEQ ID NO: 1833 - DNA, 21 bp, synthetic construct
  source 1..21: mol_type = other DNA
tggtcacacctgaagagaaag

SEQ ID NO: 1834 - DNA, 21 bp, synthetic construct
  source 1..21: mol_type = other DNA
cttacctccagacaagaggcc

SEQ ID NO: 1835 - DNA, 20 bp, synthetic construct
  source 1..20: mol_type = other DNA
ctccttccgacttctccaag

SEQ ID NO: 1836 - DNA, 20 bp, synthetic construct
  source 1..20: mol_type = other DNA
tccttccgacttctccaaga

SEQ ID NO: 1837 - DNA, 20 bp, synthetic construct
  source 1..20: mol_type = other DNA
tctccaagagggccaggcac

SEQ ID NO: 1838 - DNA, 20 bp, synthetic construct
  source 1..20: mol_type = other DNA
ctcaagaccaaaagactgtc

SEQ ID NO: 1839 - DNA, 20 bp, synthetic construct
  source 1..20: mol_type = other DNA
agaccaaaagactgtcagga

SEQ ID NO: 1840 - DNA, 20 bp, synthetic construct
  source 1..20: mol_type = other DNA
cctgccaagtgaatggccga

SEQ ID NO: 1841 - DNA, 20 bp, synthetic construct
  source 1..20: mol_type = other DNA
ctcccagcggcgaacgtgtc

SEQ ID NO: 1842 - DNA, 20 bp, synthetic construct
  source 1..20: mol_type = other DNA
cagcggcgaacgtgtcagga

SEQ ID NO: 1843 - DNA, 20 bp, synthetic construct
  source 1..20: mol_type = other DNA
cggcgaacgtgtcaggaagg

SEQ ID NO: 1844 - DNA, 20 bp, synthetic construct
  source 1..20: mol_type = other DNA
cgtgtcaggaaggtggctct

SEQ ID NO: 1845 - DNA, 20 bp, synthetic construct
  source 1..20: mol_type = other DNA
ttttctaccaaatgatcggt

SEQ ID NO: 1846 - DNA, 20 bp, synthetic construct
  source 1..20: mol_type = other DNA
tttctaccaaatgatcggta

SEQ ID NO: 1847 - DNA, 20 bp, synthetic construct
  source 1..20: mol_type = other DNA
gcaacaaagtaagacatact

SEQ ID NO: 1848 - DNA, 20 bp, synthetic construct
  source 1..20: mol_type = other DNA
acctctttcaagtgctgccc

SEQ ID NO: 1849 - DNA, 20 bp, synthetic construct
  source 1..20: mol_type = other DNA
gaaactccaagatgaggatt

SEQ ID NO: 1850 - DNA, 20 bp, synthetic construct
  source 1..20: mol_type = other DNA
aaactccaagatgaggattt

SEQ ID NO: 1851 - DNA, 20 bp, synthetic construct
  source 1..20: mol_type = other DNA
caccaacctgcagaggcagt

SEQ ID NO: 1852 - DNA, 20 bp, synthetic construct
  source 1..20: mol_type = other DNA
accaacctgcagaggcagtg

SEQ ID NO: 1853 - DNA, 20 bp, synthetic construct
  source 1..20: mol_type = other DNA
tgcctttctgtaggggaggt

SEQ ID NO: 1854 - DNA, 20 bp, synthetic construct
  source 1..20: mol_type = other DNA
aaatgggcctataaaggaca

SEQ ID NO: 1855 - DNA, 20 bp, synthetic construct
  source 1..20: mol_type = other DNA
ccctcctgaagtaggagagt

SEQ ID NO: 1856 - DNA, 20 bp, synthetic construct
  source 1..20: mol_type = other DNA
tggcctgccatggttgcttg

SEQ ID NO: 1857 - DNA, 20 bp, synthetic construct
  source 1..20: mol_type = other DNA
tagacatctgagggataaaa

SEQ ID NO: 1858 - DNA, 20 bp, synthetic construct
  source 1..20: mol_type = other DNA
catctgagggataaaaagga

SEQ ID NO: 1859 - DNA, 20 bp, synthetic construct
  source 1..20: mol_type = other DNA
tgcaatcctgcagaagagac

SEQ ID NO: 1860 - DNA, 20 bp, synthetic construct
  source 1..20: mol_type = other DNA
gtgcggttccagccttcagg

SEQ ID NO: 1861 - DNA, 20 bp, synthetic construct
  source 1..20: mol_type = other DNA
tgcggttccagccttcagga

SEQ ID NO: 1862 - DNA, 20 bp, synthetic construct
  source 1..20: mol_type = other DNA
gacccaaattttggggtatg

SEQ ID NO: 1863 - DNA, 20 bp, synthetic construct
  source 1..20: mol_type = other DNA
cactccatcggccattcact

SEQ ID NO: 1864 - DNA, 20 bp, synthetic construct
  source 1..20: mol_type = other DNA
gtggattgctttgagaaggg

SEQ ID NO: 1865 - DNA, 20 bp, synthetic construct
  source 1..20: mol_type = other DNA
ccccagggatcctgctctct

SEQ ID NO: 1866 - DNA, 20 bp, synthetic construct
  source 1..20: mol_type = other DNA
tcaagaccaaaagactgtca

SEQ ID NO: 1867 - DNA, 20 bp, synthetic construct
  source 1..20: mol_type = other DNA
gcacctgccaagtgaatggc

SEQ ID NO: 1868 - DNA, 20 bp, synthetic construct
  source 1..20: mol_type = other DNA
ctgccaagtgaatggccgat

SEQ ID NO: 1869 - DNA, 20 bp, synthetic construct
  source 1..20: mol_type = other DNA
gaatggccgatggagtgggc

SEQ ID NO: 1870 - DNA, 20 bp, synthetic construct
  source 1..20: mol_type = other DNA
agtgggcagacagcgatctg

SEQ ID NO: 1871 - DNA, 20 bp, synthetic construct
  source 1..20: mol_type = other DNA
ggcagccagtaccgccttga

SEQ ID NO: 1872 - DNA, 20 bp, synthetic construct
  source 1..20: mol_type = other DNA
tcccagcggcgaacgtgtca

SEQ ID NO: 1873 - DNA, 20 bp, synthetic construct
  source 1..20: mol_type = other DNA
gtgtcaggaaggtggctctt

SEQ ID NO: 1874 - DNA, 20 bp, synthetic construct
  source 1..20: mol_type = other DNA
aggggaacaacagaagcgga

SEQ ID NO: 1875 - DNA, 20 bp, synthetic construct
  source 1..20: mol_type = other DNA
cctccaggcagtgtacagca

SEQ ID NO: 1876 - DNA, 20 bp, synthetic construct
  source 1..20: mol_type = other DNA
ttctaccaaatgatcggtag

SEQ ID NO: 1877 - DNA, 20 bp, synthetic construct
  source 1..20: mol_type = other DNA
ctaccaaatgatcggtaggg

SEQ ID NO: 1878 - DNA, 20 bp, synthetic construct
  source 1..20: mol_type = other DNA
caagcaaccatggcaggcca

SEQ ID NO: 1879 - DNA, 20 bp, synthetic construct
  source 1..20: mol_type = other DNA
tatggccagactatcaggtg

SEQ ID NO: 1880 - DNA, 20 bp, synthetic construct
  source 1..20: mol_type = other DNA
cacttgccagcaacaaagta

SEQ ID NO: 1881 - DNA, 20 bp, synthetic construct
  source 1..20: mol_type = other DNA
gctcaatatgccccaggcta

SEQ ID NO: 1882 - DNA, 20 bp, synthetic construct
  source 1..20: mol_type = other DNA
ctttcaagtgctgccctggc

SEQ ID NO: 1883 - DNA, 20 bp, synthetic construct
  source 1..20: mol_type = other DNA
ccttcagccagggcagcact

SEQ ID NO: 1884 - DNA, 20 bp, synthetic construct
  source 1..20: mol_type = other DNA
cagccagggcagcacttgaa

SEQ ID NO: 1885 - DNA, 20 bp, synthetic construct
  source 1..20: mol_type = other DNA
gcctttctgtaggggaggtg

SEQ ID NO: 1886 - DNA, 20 bp, synthetic construct
  source 1..20: mol_type = other DNA
aatgggcctataaaggacaa

SEQ ID NO: 1887 - DNA, 20 bp, synthetic construct
  source 1..20: mol_type = other DNA
tgggcctataaaggacaagg

SEQ ID NO: 1888 - DNA, 20 bp, synthetic construct
  source 1..20: mol_type = other DNA
gtgttcccaaaccatgccac

SEQ ID NO: 1889 - DNA, 20 bp, synthetic construct
  source 1..20: mol_type = other DNA
gttcccaaaccatgccacag

SEQ ID NO: 1890 - DNA, 20 bp, synthetic construct
  source 1..20: mol_type = other DNA
gcggttccagccttcaggag

SEQ ID NO: 1891 - DNA, 20 bp, synthetic construct
  source 1..20: mol_type = other DNA
ttgtggtctgtggagaggga

SEQ ID NO: 1892 - DNA, 20 bp, synthetic construct
  source 1..20: mol_type = other DNA
gagtctgggagagtcagaaa

SEQ ID NO: 1893 - DNA, 20 bp, synthetic construct
  source 1..20: mol_type = other DNA
cgctccaagagccaccttcc

SEQ ID NO: 1894 - DNA, 20 bp, synthetic construct
  source 1..20: mol_type = other DNA
taccccgctgcagaggtatg

SEQ ID NO: 1895 - DNA, 20 bp, synthetic construct
  source 1..20: mol_type = other DNA
gggccagtattccccgttct

SEQ ID NO: 1896 - DNA, 20 bp, synthetic construct
  source 1..20: mol_type = other DNA
tggattgctttgagaagggg

SEQ ID NO: 1897 - DNA, 20 bp, synthetic construct
  source 1..20: mol_type = other DNA
agggtgctccaggaccccgt

SEQ ID NO: 1898 - DNA, 20 bp, synthetic construct
  source 1..20: mol_type = other DNA
cacctgaagagaaaggctga

SEQ ID NO: 1899 - RNA, 20 nt, synthetic construct
  source 1..20: mol_type = other RNA
ctgcaggattgcacaacatg

SEQ ID NO: 1900 - RNA, 20 nt, synthetic construct
  source 1..20: mol_type = other RNA
ataggcccatttgtctcccc

SEQ ID NO: 1901 - RNA, 20 nt, synthetic construct
  source 1..20: mol_type = other RNA
ctctgcaggttggtgtaatc

SEQ ID NO: 1902 - RNA, 20 nt, synthetic construct
  source 1..20: mol_type = other RNA
acgctctcacctgatagtct

SEQ ID NO: 1903 - RNA, 20 nt, synthetic construct
  source 1..20: mol_type = other RNA
cttacaatgactgagatctt

SEQ ID NO: 1904 - RNA, 20 nt, synthetic construct
  source 1..20: mol_type = other RNA
tcacctccgttgtcacagat

SEQ ID NO: 1905 - RNA, 20 nt, synthetic construct
  source 1..20: mol_type = other RNA
tcgcttacctccagacaaga

SEQ ID NO: 1906 - RNA, 20 nt, synthetic construct
  source 1..20: mol_type = other RNA
cacccacaggtggcaagtta

SEQ ID NO: 1907 - RNA, 20 nt, synthetic construct
  source 1..20: mol_type = other RNA
acagaccacaagttgaagtc

SEQ ID NO: 1908 - RNA, 20 nt, synthetic construct
  source 1..20: mol_type = other RNA
tctgcaggattgcacaacat

SEQ ID NO: 1909 - RNA, 20 nt, synthetic construct
  source 1..20: mol_type = other RNA
gcaggattgcacaacatggg

SEQ ID NO: 1910 - RNA, 20 nt, synthetic construct
  source 1..20: mol_type = other RNA
ccctcagatgtctatgtgtt

SEQ ID NO: 1911 - RNA, 20 nt, synthetic construct
  source 1..20: mol_type = other RNA
cctcagatgtctatgtgttt

SEQ ID NO: 1912 - RNA, 20 nt, synthetic construct
  source 1..20: mol_type = other RNA
ctcagatgtctatgtgtttg

SEQ ID NO: 1913 - RNA, 20 nt, synthetic construct
  source 1..20: mol_type = other RNA
gtgtccccagcgcccttcaa

SEQ ID NO: 1914 - RNA, 20 nt, synthetic construct
  source 1..20: mol_type = other RNA
tgtccccagcgcccttcaaa

SEQ ID NO: 1915 - RNA, 20 nt, synthetic construct
  source 1..20: mol_type = other RNA
ctacttcaggaggggagaag

SEQ ID NO: 1916 - RNA, 20 nt, synthetic construct
  source 1..20: mol_type = other RNA
tacttcaggaggggagaagc

SEQ ID NO: 1917 - RNA, 20 nt, synthetic construct
  source 1..20: mol_type = other RNA
ctccttgcaggtgattctgg

SEQ ID NO: 1918 - RNA, 20 nt, synthetic construct
  source 1..20: mol_type = other RNA
tgcaggttggtgtaatcagc

SEQ ID NO: 1919 - RNA, 20 nt, synthetic construct
  source 1..20: mol_type = other RNA
gcaggttggtgtaatcagct

SEQ ID NO: 1920 - RNA, 20 nt, synthetic construct
  source 1..20: mol_type = other RNA
tctcacctctgcaagtattg

SEQ ID NO: 1921 - RNA, 20 nt, synthetic construct
  source 1..20: mol_type = other RNA
cttactttgttgctggcaag

SEQ ID NO: 1922 - RNA, 20 nt, synthetic construct
  source 1..20: mol_type = other RNA
gcttacaatgactgagatct

SEQ ID NO: 1923 - RNA, 20 nt, synthetic construct
  source 1..20: mol_type = other RNA
tcacccagataatcctccct

SEQ ID NO: 1924 - RNA, 20 nt, synthetic construct
  source 1..20: mol_type = other RNA
ccttctgaccatcagtcatg

SEQ ID NO: 1925 - RNA, 20 nt, synthetic construct
  source 1..20: mol_type = other RNA
caaaggtcaccttggcagga

SEQ ID NO: 1926 - RNA, 20 nt, synthetic construct
  source 1..20: mol_type = other RNA
ctcgcttacctccagacaag

SEQ ID NO: 1927 - RNA, 20 nt, synthetic construct
  source 1..20: mol_type = other RNA
tcaaagcaatccactgtcca

SEQ ID NO: 1928 - RNA, 20 nt, synthetic construct
  source 1..20: mol_type = other RNA
ctcccagactccttcatgta

SEQ ID NO: 1929 - RNA, 20 nt, synthetic construct
  source 1..20: mol_type = other RNA
cccaggggaacaacagaagc

SEQ ID NO: 1930 - RNA, 20 nt, synthetic construct
  source 1..20: mol_type = other RNA
acaggtggcaagttatggtg

SEQ ID NO: 1931 - RNA, 20 nt, synthetic construct
  source 1..20: mol_type = other RNA
gccagatgaaagccagtctc

SEQ ID NO: 1932 - RNA, 20 nt, synthetic construct
  source 1..20: mol_type = other RNA
gtccccagcgcccttcaaag

SEQ ID NO: 1933 - RNA, 20 nt, synthetic construct
  source 1..20: mol_type = other RNA
tacagaaaggcagctgtgag

SEQ ID NO: 1934 - RNA, 20 nt, synthetic construct
  source 1..20: mol_type = other RNA
gaggactcacttgaatgaaa

SEQ ID NO: 1935 - RNA, 20 nt, synthetic construct
  source 1..20: mol_type = other RNA
tctcaccttatccccattct

SEQ ID NO: 1936 - RNA, 20 nt, synthetic construct
  source 1..20: mol_type = other RNA
atccttacctacgctgacct

SEQ ID NO: 1937 - RNA, 20 nt, synthetic construct
  source 1..20: mol_type = other RNA
ttacctacgctgaccttgat

SEQ ID NO: 1938 - RNA, 20 nt, synthetic construct
  source 1..20: mol_type = other RNA
ctccctaccgatcatttggt

SEQ ID NO: 1939 - RNA, 20 nt, synthetic construct
  source 1..20: mol_type = other RNA
ctgaccatcagtcatgagga

SEQ ID NO: 1940 - RNA, 20 nt, synthetic construct
  source 1..20: mol_type = other RNA
cttctcacctccgttgtcac

SEQ ID NO: 1941 - RNA, 21 nt, synthetic construct
  source 1..21: mol_type = other RNA
tccctcagatgtctatgtgtt

SEQ ID NO: 1942 - RNA, 21 nt, synthetic construct
  source 1..21: mol_type = other RNA
ctgccagatgaaagccagtct

SEQ ID NO: 1943 - RNA, 21 nt, synthetic construct
  source 1..21: mol_type = other RNA
ttctctcacctctgcaagtat

SEQ ID NO: 1944 - RNA, 21 nt, synthetic construct
  source 1..21: mol_type = other RNA
ccttacctacgctgaccttga

SEQ ID NO: 1945 - RNA, 21 nt, synthetic construct
  source 1..21: mol_type = other RNA
actcacccagataatcctccc

SEQ ID NO: 1946 - RNA, 21 nt, synthetic construct
  source 1..21: mol_type = other RNA
tcccttctgaccatcagtcat

SEQ ID NO: 1947 - RNA, 21 nt, synthetic construct
  source 1..21: mol_type = other RNA
cttcaggtgtgaccaccactc

SEQ ID NO: 1948 - RNA, 21 nt, synthetic construct
  source 1..21: mol_type = other RNA
ccctctccacagaccacaagt

SEQ ID NO: 1949 - RNA, 21 nt, synthetic construct
  source 1..21: mol_type = other RNA
ctacagaaaggcagctgtgag

SEQ ID NO: 1950 - RNA, 21 nt, synthetic construct
  source 1..21: mol_type = other RNA
gtatgtcttactttgttgctg

SEQ ID NO: 1951 - RNA, 21 nt, synthetic construct
  source 1..21: mol_type = other RNA
tgtcttactttgttgctggca

SEQ ID NO: 1952 - RNA, 21 nt, synthetic construct
  source 1..21: mol_type = other RNA
tgcatccttacctacgctgac

SEQ ID NO: 1953 - RNA, 21 nt, synthetic construct
  source 1..21: mol_type = other RNA
ggattctgtgcttacaatgac

SEQ ID NO: 1954 - RNA, 21 nt, synthetic construct
  source 1..21: mol_type = other RNA
cttgtatctccctaccgatca

SEQ ID NO: 1955 - RNA, 21 nt, synthetic construct
  source 1..21: mol_type = other RNA
cttctgaccatcagtcatgag

SEQ ID NO: 1956 - RNA, 21 nt, synthetic construct
  source 1..21: mol_type = other RNA
ccctaacctctgaccttcata

SEQ ID NO: 1957 - RNA, 21 nt, synthetic construct
  source 1..21: mol_type = other RNA
aggaggattccaccttctcaa

SEQ ID NO: 1958 - RNA, 21 nt, synthetic construct
  source 1..21: mol_type = other RNA
atgcttctcacctccgttgtc

SEQ ID NO: 1959 - RNA, 21 nt, synthetic construct
  source 1..21: mol_type = other RNA
ttctccaagagggccaggcac

SEQ ID NO: 1960 - RNA, 21 nt, synthetic construct
  source 1..21: mol_type = other RNA
accaaaagactgtcaggaagg

SEQ ID NO: 1961 - RNA, 21 nt, synthetic construct
  source 1..21: mol_type = other RNA
acctgccaagtgaatggccga

SEQ ID NO: 1962 - RNA, 21 nt, synthetic construct
  source 1..21: mol_type = other RNA
gagcaacatgtgttcaaagtc

SEQ ID NO: 1963 - RNA, 21 nt, synthetic construct
  source 1..21: mol_type = other RNA
tacaccaacctgcagaggcag

SEQ ID NO: 1964 - RNA, 21 nt, synthetic construct
  source 1..21: mol_type = other RNA
ggctttcatctggcagagaag

SEQ ID NO: 1965 - RNA, 21 nt, synthetic construct
  source 1..21: mol_type = other RNA
gacatctgagggataaaaagg

SEQ ID NO: 1966 - RNA, 21 nt, synthetic construct
  source 1..21: mol_type = other RNA
tgttgttcccctgggtgccag

SEQ ID NO: 1967 - RNA, 21 nt, synthetic construct
  source 1..21: mol_type = other RNA
atcgcacctgccaagtgaatg

SEQ ID NO: 1968 - RNA, 21 nt, synthetic construct
  source 1..21: mol_type = other RNA
tggccgatggagtgggcagac

SEQ ID NO: 1969 - RNA, 21 nt, synthetic construct
  source 1..21: mol_type = other RNA
tcccagcggcgaacgtgtcag

SEQ ID NO: 1970 - RNA, 21 nt, synthetic construct
  source 1..21: mol_type = other RNA
cccaggggaacaacagaagcg

SEQ ID NO: 1971 - RNA, 21 nt, synthetic construct
  source 1..21: mol_type = other RNA
gtcacgaagcagctcaatgaa

SEQ ID NO: 1972 - RNA, 21 nt, synthetic construct
  source 1..21: mol_type = other RNA
ggccctccaggcagtgtacag

SEQ ID NO: 1973 - RNA, 21 nt, synthetic construct
  source 1..21: mol_type = other RNA
tttctaccaaatgatcggtag

SEQ ID NO: 1974 - RNA, 21 nt, synthetic construct
  source 1..21: mol_type = other RNA
gcaaccatggcaggccaagat

SEQ ID NO: 1975 - RNA, 21 nt, synthetic construct
  source 1..21: mol_type = other RNA
tcagccagggcagcacttgaa

SEQ ID NO: 1976 - RNA, 21 nt, synthetic construct
  source 1..21: mol_type = other RNA
cttactttgttgctggcaagt

SEQ ID NO: 1977 - RNA, 21 nt, synthetic construct
  source 1..21: mol_type = other RNA
ctcccctcctgaagtaggaga

SEQ ID NO: 1978 - RNA, 21 nt, synthetic construct
  source 1..21: mol_type = other RNA
tttgaagggcgctggggacac

SEQ ID NO: 1979 - RNA, 21 nt, synthetic construct
  source 1..21: mol_type = other RNA
tcttggcctgccatggttgct

SEQ ID NO: 1980 - RNA, 21 nt, synthetic construct
  source 1..21: mol_type = other RNA
tggcctgccatggttgcttgt

SEQ ID NO: 1981 - RNA, 21 nt, synthetic construct
  source 1..21: mol_type = other RNA
atgaaggagtctgggagagtc

SEQ ID NO: 1982 - RNA, 21 nt, synthetic construct
  source 1..21: mol_type = other RNA
ggagtctgggagagtcagaaa

SEQ ID NO: 1983 - RNA, 21 nt, synthetic construct
  source 1..21: mol_type = other RNA
cgctgcagaggtatgagacat

SEQ ID NO: 1984 - RNA, 21 nt, synthetic construct
  source 1..21: mol_type = other RNA
actccatcggccattcacttg

SEQ ID NO: 1985 - RNA, 21 nt, synthetic construct
  source 1..21: mol_type = other RNA
ggggccagtattccccgttct

SEQ ID NO: 1986 - RNA, 21 nt, synthetic construct
  source 1..21: mol_type = other RNA
ggattgctttgagaagggggg

SEQ ID NO: 1987 - RNA, 21 nt, synthetic construct
  source 1..21: mol_type = other RNA
ttcagggtgctccaggacccc

SEQ ID NO: 1988 - RNA, 21 nt, synthetic construct
  source 1..21: mol_type = other RNA
gctccaggaccccgtagatct

SEQ ID NO: 1989 - RNA, 21 nt, synthetic construct
  source 1..21: mol_type = other RNA
tggtcacacctgaagagaaag

SEQ ID NO: 1990 - RNA, 21 nt, synthetic construct
  source 1..21: mol_type = other RNA
cttacctccagacaagaggcc

SEQ ID NO: 1991 - RNA, 20 nt, synthetic construct
  source 1..20: mol_type = other RNA
ctccttccgacttctccaag

SEQ ID NO: 1992 - RNA, 20 nt, synthetic construct
  source 1..20: mol_type = other RNA
tccttccgacttctccaaga

SEQ ID NO: 1993 - RNA, 20 nt, synthetic construct
  source 1..20: mol_type = other RNA
tctccaagagggccaggcac

SEQ ID NO: 1994 - RNA, 20 nt, synthetic construct
  source 1..20: mol_type = other RNA
ctcaagaccaaaagactgtc

SEQ ID NO: 1995 - RNA, 20 nt, synthetic construct
  source 1..20: mol_type = other RNA
agaccaaaagactgtcagga

SEQ ID NO: 1996 - RNA, 20 nt, synthetic construct
  source 1..20: mol_type = other RNA
cctgccaagtgaatggccga

SEQ ID NO: 1997 - RNA, 20 nt, synthetic construct
  source 1..20: mol_type = other RNA
ctcccagcggcgaacgtgtc

SEQ ID NO: 1998 - RNA, 20 nt, synthetic construct
  source 1..20: mol_type = other RNA
cagcggcgaacgtgtcagga

SEQ ID NO: 1999 - RNA, 20 nt, synthetic construct
  source 1..20: mol_type = other RNA
cggcgaacgtgtcaggaagg

SEQ ID NO: 2000 - RNA, 20 nt, synthetic construct
  source 1..20: mol_type = other RNA
cgtgtcaggaaggtggctct

SEQ ID NO: 2001 - RNA, 20 nt, synthetic construct
  source 1..20: mol_type = other RNA
ttttctaccaaatgatcggt

SEQ ID NO: 2002 - RNA, 20 nt, synthetic construct
  source 1..20: mol_type = other RNA
tttctaccaaatgatcggta

SEQ ID NO: 2003 - RNA, 20 nt, synthetic construct
  source 1..20: mol_type = other RNA
gcaacaaagtaagacatact

SEQ ID NO: 2004 - RNA, 20 nt, synthetic construct
  source 1..20: mol_type = other RNA
acctctttcaagtgctgccc

SEQ ID NO: 2005 - RNA, 20 nt, synthetic construct
  source 1..20: mol_type = other RNA
gaaactccaagatgaggatt

SEQ ID NO: 2006 - RNA, 20 nt, synthetic construct
  source 1..20: mol_type = other RNA
aaactccaagatgaggattt

SEQ ID NO: 2007 - RNA, 20 nt, synthetic construct
  source 1..20: mol_type = other RNA
caccaacctgcagaggcagt

SEQ ID NO: 2008 - RNA, 20 nt, synthetic construct
  source 1..20: mol_type = other RNA
accaacctgcagaggcagtg

SEQ ID NO: 2009 - RNA, 20 nt, synthetic construct
  source 1..20: mol_type = other RNA
tgcctttctgtaggggaggt

SEQ ID NO: 2010 - RNA, 20 nt, synthetic construct
  source 1..20: mol_type = other RNA
aaatgggcctataaaggaca

SEQ ID NO: 2011 - RNA, 20 nt, synthetic construct
  source 1..20: mol_type = other RNA
ccctcctgaagtaggagagt

SEQ ID NO: 2012 - RNA, 20 nt, synthetic construct
  source 1..20: mol_type = other RNA
tggcctgccatggttgcttg

SEQ ID NO: 2013 - RNA, 20 nt, synthetic construct
  source 1..20: mol_type = other RNA
tagacatctgagggataaaa

SEQ ID NO: 2014 - RNA, 20 nt, synthetic construct
  source 1..20: mol_type = other RNA
catctgagggataaaaagga

SEQ ID NO: 2015 - RNA, 20 nt, synthetic construct
  source 1..20: mol_type = other RNA
tgcaatcctgcagaagagac

SEQ ID NO: 2016 - RNA, 20 nt, synthetic construct
  source 1..20: mol_type = other RNA
gtgcggttccagccttcagg

SEQ ID NO: 2017 - RNA, 20 nt, synthetic construct
  source 1..20: mol_type = other RNA
tgcggttccagccttcagga

SEQ ID NO: 2018 - RNA, 20 nt, synthetic construct
  source 1..20: mol_type = other RNA
gacccaaattttggggtatg

SEQ ID NO: 2019 - RNA, 20 nt, synthetic construct
  source 1..20: mol_type = other RNA
cactccatcggccattcact

SEQ ID NO: 2020 - RNA, 20 nt, synthetic construct
  source 1..20: mol_type = other RNA
gtggattgctttgagaaggg

SEQ ID NO: 2021 - RNA, 20 nt, synthetic construct
  source 1..20: mol_type = other RNA
ccccagggatcctgctctct

SEQ ID NO: 2022 - RNA, 20 nt, synthetic construct
  source 1..20: mol_type = other RNA
tcaagaccaaaagactgtca

SEQ ID NO: 2023 - RNA, 20 nt, synthetic construct
  source 1..20: mol_type = other RNA
gcacctgccaagtgaatggc

SEQ ID NO: 2024 - RNA, 20 nt, synthetic construct
  source 1..20: mol_type = other RNA
ctgccaagtgaatggccgat

SEQ ID NO: 2025 - RNA, 20 nt, synthetic construct
  source 1..20: mol_type = other RNA
gaatggccgatggagtgggc

SEQ ID NO: 2026 - RNA, 20 nt, synthetic construct
  source 1..20: mol_type = other RNA
agtgggcagacagcgatctg

SEQ ID NO: 2027 - RNA, 20 nt, synthetic construct
  source 1..20: mol_type = other RNA
ggcagccagtaccgccttga

SEQ ID NO: 2028 - RNA, 20 nt, synthetic construct
  source 1..20: mol_type = other RNA
tcccagcggcgaacgtgtca

SEQ ID NO: 2029 - RNA, 20 nt, synthetic construct
  source 1..20: mol_type = other RNA
gtgtcaggaaggtggctctt

SEQ ID NO: 2030 - RNA, 20 nt, synthetic construct
  source 1..20: mol_type = other RNA
aggggaacaacagaagcgga

SEQ ID NO: 2031 - RNA, 20 nt, synthetic construct
  source 1..20: mol_type = other RNA
cctccaggcagtgtacagca

SEQ ID NO: 2032 - RNA, 20 nt, synthetic construct
  source 1..20: mol_type = other RNA
ttctaccaaatgatcggtag

SEQ ID NO: 2033 - RNA, 20 nt, synthetic construct
  source 1..20: mol_type = other RNA
ctaccaaatgatcggtaggg

SEQ ID NO: 2034 - RNA, 20 nt, synthetic construct
  source 1..20: mol_type = other RNA
caagcaaccatggcaggcca

SEQ ID NO: 2035 - RNA, 20 nt, synthetic construct
  source 1..20: mol_type = other RNA
tatggccagactatcaggtg

SEQ ID NO: 2036 - RNA, 20 nt, synthetic construct
  source 1..20: mol_type = other RNA
cacttgccagcaacaaagta

SEQ ID NO: 2037 - RNA, 20 nt, synthetic construct
  source 1..20: mol_type = other RNA
gctcaatatgccccaggcta

SEQ ID NO: 2038 - RNA, 20 nt, synthetic construct
  source 1..20: mol_type = other RNA
ctttcaagtgctgccctggc

SEQ ID NO: 2039 - RNA, 20 nt, synthetic construct
  source 1..20: mol_type = other RNA
ccttcagccagggcagcact

SEQ ID NO: 2040 - RNA, 20 nt, synthetic construct
  source 1..20: mol_type = other RNA
cagccagggcagcacttgaa

SEQ ID NO: 2041 - RNA, 20 nt, synthetic construct
  source 1..20: mol_type = other RNA
gcctttctgtaggggaggtg

SEQ ID NO: 2042 - RNA, 20 nt, synthetic construct
  source 1..20: mol_type = other RNA
aatgggcctataaaggacaa

SEQ ID NO: 2043 - RNA, 20 nt, synthetic construct
  source 1..20: mol_type = other RNA
tgggcctataaaggacaagg

SEQ ID NO: 2044 - RNA, 20 nt, synthetic construct
  source 1..20: mol_type = other RNA
gtgttcccaaaccatgccac

SEQ ID NO: 2045 - RNA, 20 nt, synthetic construct
  source 1..20: mol_type = other RNA
gttcccaaaccatgccacag

SEQ ID NO: 2046 - RNA, 20 nt, synthetic construct
  source 1..20: mol_type = other RNA
gcggttccagccttcaggag

SEQ ID NO: 2047 - RNA, 20 nt, synthetic construct
  source 1..20: mol_type = other RNA
ttgtggtctgtggagaggga

SEQ ID NO: 2048 - RNA, 20 nt, synthetic construct
  source 1..20: mol_type = other RNA
gagtctgggagagtcagaaa

SEQ ID NO: 2049 - RNA, 20 nt, synthetic construct
  source 1..20: mol_type = other RNA
cgctccaagagccaccttcc

SEQ ID NO: 2050 - RNA, 20 nt, synthetic construct
  source 1..20: mol_type = other RNA
taccccgctgcagaggtatg

SEQ ID NO: 2051 - RNA, 20 nt, synthetic construct
  source 1..20: mol_type = other RNA
gggccagtattccccgttct

SEQ ID NO: 2052 - RNA, 20 nt, synthetic construct
  source 1..20: mol_type = other RNA
tggattgctttgagaagggg

SEQ ID NO: 2053 - RNA, 20 nt, synthetic construct
  source 1..20: mol_type = other RNA
agggtgctccaggaccccgt

SEQ ID NO: 2054 - RNA, 20 nt, synthetic construct
  source 1..20: mol_type = other RNA
cacctgaagagaaaggctga

SEQ ID NO: 2055 - DNA, 23 bp, synthetic construct
  source 1..23: mol_type = other DNA
cttctcacctccgttgtcacaga

SEQ ID NO: 2056 - DNA, 23 bp, synthetic construct
  source 1..23: mol_type = other DNA
ctgaccatcagtcatgaggatga

SEQ ID NO: 2057 - DNA, 23 bp, synthetic construct
  source 1..23: mol_type = other DNA
ctccctaccgatcatttggtaga

SEQ ID NO: 2058 - DNA, 23 bp, synthetic construct
  source 1..23: mol_type = other DNA
ttacctacgctgaccttgattga

SEQ ID NO: 2059 - DNA, 23 bp, synthetic construct
  source 1..23: mol_type = other DNA
atccttacctacgctgaccttga

SEQ ID NO: 2060 - DNA, 23 bp, synthetic construct
  source 1..23: mol_type = other DNA
tctcaccttatccccattcttga

SEQ ID NO: 2061 - DNA, 23 bp, synthetic construct
  source 1..23: mol_type = other DNA
tcgcttacctccagacaagaggc

SEQ ID NO: 2062 - DNA, 23 bp, synthetic construct
  source 1..23: mol_type = other DNA
tcacctccgttgtcacagatcgc

SEQ ID NO: 2063 - DNA, 23 bp, synthetic construct
  source 1..23: mol_type = other DNA
cttacaatgactgagatcttggc

SEQ ID NO: 2064 - DNA, 23 bp, synthetic construct
  source 1..23: mol_type = other DNA
aacctgcagaggcagtggggtgc

SEQ ID NO: 2065 - DNA, 23 bp, synthetic construct
  source 1..23: mol_type = other DNA
ctcgcttacctccagacaagagg

SEQ ID NO: 2066 - DNA, 23 bp, synthetic construct
  source 1..23: mol_type = other DNA
ccttctgaccatcagtcatgagg

SEQ ID NO: 2067 - DNA, 23 bp, synthetic construct
  source 1..23: mol_type = other DNA
tcacccagataatcctcccttgg

SEQ ID NO: 2068 - DNA, 23 bp, synthetic construct
  source 1..23: mol_type = other DNA
gcttacaatgactgagatcttgg

SEQ ID NO: 2069 - DNA, 23 bp, synthetic construct
  source 1..23: mol_type = other DNA
cttactttgttgctggcaagtgg

SEQ ID NO: 2070 - DNA, 23 bp, synthetic construct
  source 1..23: mol_type = other DNA
tctcacctctgcaagtattgggg

SEQ ID NO: 2071 - DNA, 23 bp, synthetic construct
  source 1..23: mol_type = other DNA
ccctcgcttacctccagacaaga

SEQ ID NO: 2072 - DNA, 23 bp, synthetic construct
  source 1..23: mol_type = other DNA
cttctcacctccgttgtcacaga

SEQ ID NO: 2073 - DNA, 23 bp, synthetic construct
  source 1..23: mol_type = other DNA
ggtcaaaggtcaccttggcagga

SEQ ID NO: 2074 - DNA, 23 bp, synthetic construct
  source 1..23: mol_type = other DNA
ttccaccttctcaattaagttga

SEQ ID NO: 2075 - DNA, 23 bp, synthetic construct
  source 1..23: mol_type = other DNA
taacctctgaccttcataattga

SEQ ID NO: 2076 - DNA, 23 bp, synthetic construct
  source 1..23: mol_type = other DNA
ctgaccatcagtcatgaggatga

SEQ ID NO: 2077 - DNA, 23 bp, synthetic construct
  source 1..23: mol_type = other DNA
cttctgaccatcagtcatgagga

SEQ ID NO: 2078 - DNA, 23 bp, synthetic construct
  source 1..23: mol_type = other DNA
tcccttctgaccatcagtcatga

SEQ ID NO: 2079 - DNA, 23 bp, synthetic construct
  source 1..23: mol_type = other DNA
ctccctaccgatcatttggtaga

SEQ ID NO: 2080 - DNA, 23 bp, synthetic construct
  source 1..23: mol_type = other DNA
ttctgtgcttacaatgactgaga

SEQ ID NO: 2081 - DNA, 23 bp, synthetic construct
  source 1..23: mol_type = other DNA
ttacctacgctgaccttgattga

SEQ ID NO: 2082 - DNA, 23 bp, synthetic construct
  source 1..23: mol_type = other DNA
atccttacctacgctgaccttga

SEQ ID NO: 2083 - DNA, 23 bp, synthetic construct
  source 1..23: mol_type = other DNA
tctcaccttatccccattcttga

SEQ ID NO: 2084 - DNA, 23 bp, synthetic construct
  source 1..23: mol_type = other DNA
gaggactcacttgaatgaaacga

SEQ ID NO: 2085 - DNA, 23 bp, synthetic construct
  source 1..23: mol_type = other DNA
tcaaagcaatccactgtccaaga

SEQ ID NO: 2086 - DNA, 23 bp, synthetic construct
  source 1..23: mol_type = other DNA
ctcccagactccttcatgtacga

SEQ ID NO: 2087 - DNA, 23 bp, synthetic construct
  source 1..23: mol_type = other DNA
ctggcacccaggggaacaacaga

SEQ ID NO: 2088 - DNA, 23 bp, synthetic construct
  source 1..23: mol_type = other DNA
cccaggggaacaacagaagcgga

SEQ ID NO: 2089 - DNA, 23 bp, synthetic construct
  source 1..23: mol_type = other DNA
acaggtggcaagttatggtgtga

SEQ ID NO: 2090 - DNA, 23 bp, synthetic construct
  source 1..23: mol_type = other DNA
cctctccacagaccacaagttga

SEQ ID NO: 2091 - DNA, 23 bp, synthetic construct
  source 1..23: mol_type = other DNA
gccagatgaaagccagtctctga

SEQ ID NO: 2092 - DNA, 23 bp, synthetic construct
  source 1..23: mol_type = other DNA
gtccccagcgcccttcaaaggga

SEQ ID NO: 2093 - DNA, 23 bp, synthetic construct
  source 1..23: mol_type = other DNA
acttcaggaggggagaagcggga

SEQ ID NO: 2094 - DNA, 23 bp, synthetic construct
  source 1..23: mol_type = other DNA
cccctacagaaaggcagctgtga

SEQ ID NO: 2095 - DNA, 23 bp, synthetic construct
  source 1..23: mol_type = other DNA
cctacagaaaggcagctgtgaga

SEQ ID NO: 2096 - DNA, 23 bp, synthetic construct
  source 1..23: mol_type = other DNA
tacagaaaggcagctgtgagaga

SEQ ID NO: 2097 - DNA, 23 bp, synthetic construct
  source 1..23: mol_type = other DNA
ttccaccttctcaattaagttga

SEQ ID NO: 2098 - DNA, 23 bp, synthetic construct
  source 1..23: mol_type = other DNA
cttctgaccatcagtcatgagga

SEQ ID NO: 2099 - DNA, 23 bp, synthetic construct
  source 1..23: mol_type = other DNA
acttcaggaggggagaagcggga

SEQ ID NO: 2100 - DNA, 23 bp, synthetic construct
  source 1..23: mol_type = other DNA
cccctacagaaaggcagctgtga

SEQ ID NO: 2101 - DNA, 23 bp, synthetic construct
  source 1..23: mol_type = other DNA
cctacagaaaggcagctgtgaga

SEQ ID NO: 2102 - DNA, 23 bp, synthetic construct
  source 1..23: mol_type = other DNA
tcgcttacctccagacaagaggc

SEQ ID NO: 2103 - DNA, 23 bp, synthetic construct
  source 1..23: mol_type = other DNA
gccctcaaacctctgcactctgc

SEQ ID NO: 2104 - DNA, 23 bp, synthetic construct
  source 1..23: mol_type = other DNA
tcacctccgttgtcacagatcgc

SEQ ID NO: 2105 - DNA, 23 bp, synthetic construct
  source 1..23: mol_type = other DNA
aaaggtcaccttggcaggaaggc

SEQ ID NO: 2106 - DNA, 23 bp, synthetic construct
  source 1..23: mol_type = other DNA
ctgtcttcaaacctgggccgtgc

SEQ ID NO: 2107 - DNA, 23 bp, synthetic construct
  source 1..23: mol_type = other DNA
cttacaatgactgagatcttggc

SEQ ID NO: 2108 - DNA, 23 bp, synthetic construct
  source 1..23: mol_type = other DNA
acgctctcacctgatagtctggc

SEQ ID NO: 2109 - DNA, 23 bp, synthetic construct
  source 1..23: mol_type = other DNA
gtatgtcttactttgttgctggc

SEQ ID NO: 2110 - DNA, 23 bp, synthetic construct
  source 1..23: mol_type = other DNA
atacctctgcagcggggtactgc

SEQ ID NO: 2111 - DNA, 23 bp, synthetic construct
  source 1..23: mol_type = other DNA
gcacccaggggaacaacagaagc

SEQ ID NO: 2112 - DNA, 23 bp, synthetic construct
  source 1..23: mol_type = other DNA
ctgcaggattgcacaacatgggc

SEQ ID NO: 2113 - DNA, 23 bp, synthetic construct
  source 1..23: mol_type = other DNA
tcctacttcaggaggggagaagc

SEQ ID NO: 2114 - DNA, 23 bp, synthetic construct
  source 1..23: mol_type = other DNA
ataggcccatttgtctcccctgc

SEQ ID NO: 2115 - DNA, 23 bp, synthetic construct
  source 1..23: mol_type = other DNA
tattcgtccagaggaagagctgc

SEQ ID NO: 2116 - DNA, 23 bp, synthetic construct
  source 1..23: mol_type = other DNA
ccagaggaagagctgctccctgc

SEQ ID NO: 2117 - DNA, 23 bp, synthetic construct
  source 1..23: mol_type = other DNA
ctctccttgcaggtgattctggc

SEQ ID NO: 2118 - DNA, 23 bp, synthetic construct
  source 1..23: mol_type = other DNA
tccttgcaggtgattctggcggc

SEQ ID NO: 2119 - DNA, 23 bp, synthetic construct
  source 1..23: mol_type = other DNA
ctctgcaggttggtgtaatcagc

SEQ ID NO: 2120 - DNA, 23 bp, synthetic construct
  source 1..23: mol_type = other DNA
gccctcaaacctctgcactctgc

SEQ ID NO: 2121 - DNA, 23 bp, synthetic construct
  source 1..23: mol_type = other DNA
aaaggtcaccttggcaggaaggc

SEQ ID NO: 2122 - DNA, 23 bp, synthetic construct
  source 1..23: mol_type = other DNA
gcacccaggggaacaacagaagc

SEQ ID NO: 2123 - DNA, 23 bp, synthetic construct
  source 1..23: mol_type = other DNA
ccagaggaagagctgctccctgc

SEQ ID NO: 2124 - DNA, 23 bp, synthetic construct
  source 1..23: mol_type = other DNA
tccttgcaggtgattctggcggc

SEQ ID NO: 2125 - DNA, 23 bp, synthetic construct
  source 1..23: mol_type = other DNA
ctcgcttacctccagacaagagg

SEQ ID NO: 2126 - DNA, 23 bp, synthetic construct
  source 1..23: mol_type = other DNA
caaaggtcaccttggcaggaagg

SEQ ID NO: 2127 - DNA, 23 bp, synthetic construct
  source 1..23: mol_type = other DNA
ccttctgaccatcagtcatgagg

SEQ ID NO: 2128 - DNA, 23 bp, synthetic construct
  source 1..23: mol_type = other DNA
tcacccagataatcctcccttgg

SEQ ID NO: 2129 - DNA, 23 bp, synthetic construct
  source 1..23: mol_type = other DNA
gtatctccctaccgatcatttgg

SEQ ID NO: 2130 - DNA, 23 bp, synthetic construct
  source 1..23: mol_type = other DNA
gcttacaatgactgagatcttgg

SEQ ID NO: 2131 - DNA, 23 bp, synthetic construct
  source 1..23: mol_type = other DNA
gacgctctcacctgatagtctgg

SEQ ID NO: 2132 - DNA, 23 bp, synthetic construct
  source 1..23: mol_type = other DNA
cttactttgttgctggcaagtgg

SEQ ID NO: 2133 - DNA, 23 bp, synthetic construct
  source 1..23: mol_type = other DNA
agtatgtcttactttgttgctgg

SEQ ID NO: 2134 - DNA, 23 bp, synthetic construct
  source 1..23: mol_type = other DNA
tctcacctctgcaagtattgggg

SEQ ID NO: 2135 - DNA, 23 bp, synthetic construct
  source 1..23: mol_type = other DNA
ctctcacctctgcaagtattggg

SEQ ID NO: 2136 - DNA, 23 bp, synthetic construct
  source 1..23: mol_type = other DNA
tctctcacctctgcaagtattgg

SEQ ID NO: 2137 - DNA, 23 bp, synthetic construct
  source 1..23: mol_type = other DNA
acccaggggaacaacagaagcgg

SEQ ID NO: 2138 - DNA, 23 bp, synthetic construct
  source 1..23: mol_type = other DNA
cacccacaggtggcaagttatgg

SEQ ID NO: 2139 - DNA, 23 bp, synthetic construct
  source 1..23: mol_type = other DNA
acagaccacaagttgaagtcagg

SEQ ID NO: 2140 - DNA, 23 bp, synthetic construct
  source 1..23: mol_type = other DNA
ttctgcaggattgcacaacatgg

SEQ ID NO: 2141 - DNA, 23 bp, synthetic construct
  source 1..23: mol_type = other DNA
tctgcaggattgcacaacatggg

SEQ ID NO: 2142 - DNA, 23 bp, synthetic construct
  source 1..23: mol_type = other DNA
gcaggattgcacaacatgggcgg

SEQ ID NO: 2143 - DNA, 23 bp, synthetic construct
  source 1..23: mol_type = other DNA
ccctcagatgtctatgtgtttgg

SEQ ID NO: 2144 - DNA, 23 bp, synthetic construct
  source 1..23: mol_type = other DNA
cctcagatgtctatgtgtttggg

SEQ ID NO: 2145 - DNA, 23 bp, synthetic construct
  source 1..23: mol_type = other DNA
ctcagatgtctatgtgtttgggg

SEQ ID NO: 2146 - DNA, 23 bp, synthetic construct
  source 1..23: mol_type = other DNA
gtgtccccagcgcccttcaaagg

SEQ ID NO: 2147 - DNA, 23 bp, synthetic construct
  source 1..23: mol_type = other DNA
tgtccccagcgcccttcaaaggg

SEQ ID NO: 2148 - DNA, 23 bp, synthetic construct
  source 1..23: mol_type = other DNA
ctacttcaggaggggagaagcgg

SEQ ID NO: 2149 - DNA, 23 bp, synthetic construct
  source 1..23: mol_type = other DNA
tacttcaggaggggagaagcggg

SEQ ID NO: 2150 - DNA, 23 bp, synthetic construct
  source 1..23: mol_type = other DNA
cctctccttgcaggtgattctgg

SEQ ID NO: 2151 - DNA, 23 bp, synthetic construct
  source 1..23: mol_type = other DNA
ctccttgcaggtgattctggcgg

SEQ ID NO: 2152 - DNA, 23 bp, synthetic construct
  source 1..23: mol_type = other DNA
tgcaggttggtgtaatcagctgg

SEQ ID NO: 2153 - DNA, 23 bp, synthetic construct
  source 1..23: mol_type = other DNA
gcaggttggtgtaatcagctggg

SEQ ID NO: 2154 - DNA, 23 bp, synthetic construct
  source 1..23: mol_type = other DNA
ctctcacctctgcaagtattggg

SEQ ID NO: 2155 - DNA, 23 bp, synthetic construct
  source 1..23: mol_type = other DNA
tctctcacctctgcaagtattgg

SEQ ID NO: 2156 - DNA, 23 bp, synthetic construct
  source 1..23: mol_type = other DNA
acccaggggaacaacagaagcgg

SEQ ID NO: 2157 - DNA, 23 bp, synthetic construct
  source 1..23: mol_type = other DNA
ttctgcaggattgcacaacatgg

SEQ ID NO: 2158 - DNA, 27 bp, synthetic construct
  source 1..27: mol_type = other DNA
tcccttctgaccatcagtcatgaggat

SEQ ID NO: 2159 - DNA, 27 bp, synthetic construct
  source 1..27: mol_type = other DNA
actcacccagataatcctcccttgggt

SEQ ID NO: 2160 - DNA, 27 bp, synthetic construct
  source 1..27: mol_type = other DNA
ccttacctacgctgaccttgattgagt

SEQ ID NO: 2161 - DNA, 27 bp, synthetic construct
  source 1..27: mol_type = other DNA
gtttctcaccttatccccattcttgat

SEQ ID NO: 2162 - DNA, 27 bp, synthetic construct
  source 1..27: mol_type = other DNA
ttctctcacctctgcaagtattggggt

SEQ ID NO: 2163 - DNA, 27 bp, synthetic construct
  source 1..27: mol_type = other DNA
cctcacccacaggtggcaagttatggt

SEQ ID NO: 2164 - DNA, 27 bp, synthetic construct
  source 1..27: mol_type = other DNA
tccctcagatgtctatgtgtttggggt

SEQ ID NO: 2165 - DNA, 27 bp, synthetic construct
  source 1..27: mol_type = other DNA
ctccttctctgccagatgaaagccagt

SEQ ID NO: 2166 - DNA, 27 bp, synthetic construct
  source 1..27: mol_type = other DNA
ctgccagatgaaagccagtctctgagt

SEQ ID NO: 2167 - DNA, 26 bp, synthetic construct
  source 1..26: mol_type = other DNA
attgccctcaaacctctgcactctgc

SEQ ID NO: 2168 - DNA, 26 bp, synthetic construct
  source 1..26: mol_type = other DNA
attctgtgcttacaatgactgagatc

SEQ ID NO: 2169 - DNA, 26 bp, synthetic construct
  source 1..26: mol_type = other DNA
gttgcatccttacctacgctgacctt

SEQ ID NO: 2170 - DNA, 26 bp, synthetic construct
  source 1..26: mol_type = other DNA
attctctcacctctgcaagtattggg

SEQ ID NO: 2171 - DNA, 26 bp, synthetic construct
  source 1..26: mol_type = other DNA
ctttctcttcaggtgtgaccaccact

SEQ ID NO: 2172 - DNA, 26 bp, synthetic construct
  source 1..26: mol_type = other DNA
cttctcaaagcaatccactgtccaag

SEQ ID NO: 2173 - DNA, 26 bp, synthetic construct
  source 1..26: mol_type = other DNA
cttctctgccagatgaaagccagtct

SEQ ID NO: 2174 - DNA, 26 bp, synthetic construct
  source 1..26: mol_type = other DNA
gttgtgtccccagcgcccttcaaagg

SEQ ID NO: 2175 - DNA, 26 bp, synthetic construct
  source 1..26: mol_type = other DNA
cttgtcctttataggcccatttgtct

SEQ ID NO: 2176 - DNA, 26 bp, synthetic construct
  source 1..26: mol_type = other DNA
attcgtccagaggaagagctgctccc

SEQ ID NO: 2177 - DNA, 27 bp, synthetic construct
  source 1..27: mol_type = other DNA
tcccttctgaccatcagtcatgaggat

SEQ ID NO: 2178 - DNA, 27 bp, synthetic construct
  source 1..27: mol_type = other DNA
actcacccagataatcctcccttgggt

SEQ ID NO: 2179 - DNA, 27 bp, synthetic construct
  source 1..27: mol_type = other DNA
ccttacctacgctgaccttgattgagt

SEQ ID NO: 2180 - DNA, 27 bp, synthetic construct
  source 1..27: mol_type = other DNA
ttctctcacctctgcaagtattggggt

SEQ ID NO: 2181 - DNA, 27 bp, synthetic construct
  source 1..27: mol_type = other DNA
atgcttctcacctccgttgtcacagat

SEQ ID NO: 2182 - DNA, 27 bp, synthetic construct
  source 1..27: mol_type = other DNA
tgttgttcccctgggtgccaggagagt

SEQ ID NO: 2183 - DNA, 27 bp, synthetic construct
  source 1..27: mol_type = other DNA
cttctgaccatcagtcatgaggatgat

SEQ ID NO: 2184 - DNA, 27 bp, synthetic construct
  source 1..27: mol_type = other DNA
tcccttctgaccatcagtcatgaggat

SEQ ID NO: 2185 - DNA, 27 bp, synthetic construct
  source 1..27: mol_type = other DNA
actcacccagataatcctcccttgggt

SEQ ID NO: 2186 - DNA, 27 bp, synthetic construct
  source 1..27: mol_type = other DNA
gacatctgagggataaaaaggaaggat

SEQ ID NO: 2187 - DNA, 27 bp, synthetic construct
  source 1..27: mol_type = other DNA
ggctttcatctggcagagaaggagaat

SEQ ID NO: 2188 - DNA, 27 bp, synthetic construct
  source 1..27: mol_type = other DNA
ccttacctacgctgaccttgattgagt

SEQ ID NO: 2189 - DNA, 27 bp, synthetic construct
  source 1..27: mol_type = other DNA
tgcatccttacctacgctgaccttgat

SEQ ID NO: 2190 - DNA, 27 bp, synthetic construct
  source 1..27: mol_type = other DNA
tgtcttactttgttgctggcaagtggt

SEQ ID NO: 2191 - DNA, 27 bp, synthetic construct
  source 1..27: mol_type = other DNA
gtatgtcttactttgttgctggcaagt

SEQ ID NO: 2192 - DNA, 27 bp, synthetic construct
  source 1..27: mol_type = other DNA
gtttctcaccttatccccattcttgat

SEQ ID NO: 2193 - DNA, 27 bp, synthetic construct
  source 1..27: mol_type = other DNA
ttctctcacctctgcaagtattggggt

SEQ ID NO: 2194 - DNA, 27 bp, synthetic construct
  source 1..27: mol_type = other DNA
tacaccaacctgcagaggcagtggggt

SEQ ID NO: 2195 - DNA, 23 bp, synthetic construct
  source 1..23: mol_type = other DNA
cacctgaagagaaaggctgatga

SEQ ID NO: 2196 - DNA, 23 bp, synthetic construct
  source 1..23: mol_type = other DNA
tggattgctttgagaagggggga

SEQ ID NO: 2197 - DNA, 23 bp, synthetic construct
  source 1..23: mol_type = other DNA
taccccgctgcagaggtatgaga

SEQ ID NO: 2198 - DNA, 23 bp, synthetic construct
  source 1..23: mol_type = other DNA
gagtctgggagagtcagaaatga

SEQ ID NO: 2199 - DNA, 23 bp, synthetic construct
  source 1..23: mol_type = other DNA
tgggcctataaaggacaaggaga

SEQ ID NO: 2200 - DNA, 23 bp, synthetic construct
  source 1..23: mol_type = other DNA
aatgggcctataaaggacaagga

SEQ ID NO: 2201 - DNA, 23 bp, synthetic construct
  source 1..23: mol_type = other DNA
gcctttctgtaggggaggtggga

SEQ ID NO: 2202 - DNA, 23 bp, synthetic construct
  source 1..23: mol_type = other DNA
gtggattgctttgagaagggggg

SEQ ID NO: 2203 - DNA, 23 bp, synthetic construct
  source 1..23: mol_type = other DNA
tgcaatcctgcagaagagacagg

SEQ ID NO: 2204 - DNA, 23 bp, synthetic construct
  source 1..23: mol_type = other DNA
catctgagggataaaaaggaagg

SEQ ID NO: 2205 - DNA, 23 bp, synthetic construct
  source 1..23: mol_type = other DNA
tagacatctgagggataaaaagg

SEQ ID NO: 2206 - DNA, 23 bp, synthetic construct
  source 1..23: mol_type = other DNA
ccctcctgaagtaggagagtagg

SEQ ID NO: 2207 - DNA, 23 bp, synthetic construct
  source 1..23: mol_type = other DNA
aaatgggcctataaaggacaagg

SEQ ID NO: 2208 - DNA, 23 bp, synthetic construct
  source 1..23: mol_type = other DNA
tgcctttctgtaggggaggtggg

SEQ ID NO: 2209 - DNA, 23 bp, synthetic construct
  source 1..23: mol_type = other DNA
accaacctgcagaggcagtgggg

SEQ ID NO: 2210 - DNA, 23 bp, synthetic construct
  source 1..23: mol_type = other DNA
cttctcacctccgttgtcacaga

SEQ ID NO: 2211 - DNA, 23 bp, synthetic construct
  source 1..23: mol_type = other DNA
cttctcacctccgttgtcacaga

SEQ ID NO: 2212 - DNA, 23 bp, synthetic construct
  source 1..23: mol_type = other DNA
ctgaccatcagtcatgaggatga

SEQ ID NO: 2213 - DNA, 23 bp, synthetic construct
  source 1..23: mol_type = other DNA
ctgaccatcagtcatgaggatga

SEQ ID NO: 2214 - DNA, 23 bp, synthetic construct
  source 1..23: mol_type = other DNA
ctccctaccgatcatttggtaga

SEQ ID NO: 2215 - DNA, 23 bp, synthetic construct
  source 1..23: mol_type = other DNA
ctccctaccgatcatttggtaga

SEQ ID NO: 2216 - DNA, 23 bp, synthetic construct
  source 1..23: mol_type = other DNA
ttacctacgctgaccttgattga

SEQ ID NO: 2217 - DNA, 23 bp, synthetic construct
  source 1..23: mol_type = other DNA
ttacctacgctgaccttgattga

SEQ ID NO: 2218 - DNA, 23 bp, synthetic construct
  source 1..23: mol_type = other DNA
atccttacctacgctgaccttga

SEQ ID NO: 2219 - DNA, 23 bp, synthetic construct
  source 1..23: mol_type = other DNA
atccttacctacgctgaccttga

SEQ ID NO: 2220 - DNA, 23 bp, synthetic construct
  source 1..23: mol_type = other DNA
tctcaccttatccccattcttga

SEQ ID NO: 2221 - DNA, 23 bp, synthetic construct
  source 1..23: mol_type = other DNA
tctcaccttatccccattcttga

SEQ ID NO: 2222 - DNA, 23 bp, synthetic construct
  source 1..23: mol_type = other DNA
gaggactcacttgaatgaaacga

SEQ ID NO: 2223 - DNA, 23 bp, synthetic construct
  source 1..23: mol_type = other DNA
gaggactcacttgaatgaaacga

SEQ ID NO: 2224 - DNA, 23 bp, synthetic construct
  source 1..23: mol_type = other DNA
tcaaagcaatccactgtccaaga

SEQ ID NO: 2225 - DNA, 23 bp, synthetic construct
  source 1..23: mol_type = other DNA
tcaaagcaatccactgtccaaga

SEQ ID NO: 2226 - DNA, 23 bp, synthetic construct
  source 1..23: mol_type = other DNA
ctcccagactccttcatgtacga

SEQ ID NO: 2227 - DNA, 23 bp, synthetic construct
  source 1..23: mol_type = other DNA
ctcccagactccttcatgtacga

SEQ ID NO: 2228 - DNA, 23 bp, synthetic construct
  source 1..23: mol_type = other DNA
cccaggggaacaacagaagcgga

SEQ ID NO: 2229 - DNA, 23 bp, synthetic construct
  source 1..23: mol_type = other DNA
cccaggggaacaacagaagcgga

SEQ ID NO: 2230 - DNA, 23 bp, synthetic construct
  source 1..23: mol_type = other DNA
acaggtggcaagttatggtgtga

SEQ ID NO: 2231 - DNA, 23 bp, synthetic construct
  source 1..23: mol_type = other DNA
acaggtggcaagttatggtgtga

SEQ ID NO: 2232 - DNA, 23 bp, synthetic construct
  source 1..23: mol_type = other DNA
gccagatgaaagccagtctctga

SEQ ID NO: 2233 - DNA, 23 bp, synthetic construct
  source 1..23: mol_type = other DNA
gccagatgaaagccagtctctga

SEQ ID NO: 2234 - DNA, 23 bp, synthetic construct
  source 1..23: mol_type = other DNA
gtccccagcgcccttcaaaggga

SEQ ID NO: 2235 - DNA, 23 bp, synthetic construct
  source 1..23: mol_type = other DNA
gtccccagcgcccttcaaaggga

SEQ ID NO: 2236 - DNA, 23 bp, synthetic construct
  source 1..23: mol_type = other DNA
tacagaaaggcagctgtgagaga

SEQ ID NO: 2237 - DNA, 23 bp, synthetic construct
  source 1..23: mol_type = other DNA
tacagaaaggcagctgtgagaga

SEQ ID NO: 2238 - DNA, 23 bp, synthetic construct
  source 1..23: mol_type = other DNA
tcgcttacctccagacaagaggc

SEQ ID NO: 2239 - DNA, 23 bp, synthetic construct
  source 1..23: mol_type = other DNA
tcgcttacctccagacaagaggc

SEQ ID NO: 2240 - DNA, 23 bp, synthetic construct
  source 1..23: mol_type = other DNA
tcacctccgttgtcacagatcgc

SEQ ID NO: 2241 - DNA, 23 bp, synthetic construct
  source 1..23: mol_type = other DNA
tcacctccgttgtcacagatcgc

SEQ ID NO: 2242 - DNA, 23 bp, synthetic construct
  source 1..23: mol_type = other DNA
cttacaatgactgagatcttggc

SEQ ID NO: 2243 - DNA, 23 bp, synthetic construct
  source 1..23: mol_type = other DNA
cttacaatgactgagatcttggc

SEQ ID NO: 2244 - DNA, 23 bp, synthetic construct
  source 1..23: mol_type = other DNA
acgctctcacctgatagtctggc

SEQ ID NO: 2245 - DNA, 23 bp, synthetic construct
  source 1..23: mol_type = other DNA
acgctctcacctgatagtctggc

SEQ ID NO: 2246 - DNA, 23 bp, synthetic construct
  source 1..23: mol_type = other DNA
ctgcaggattgcacaacatgggc

SEQ ID NO: 2247 - DNA, 23 bp, synthetic construct
  source 1..23: mol_type = other DNA
ctgcaggattgcacaacatgggc

SEQ ID NO: 2248 - DNA, 23 bp, synthetic construct
  source 1..23: mol_type = other DNA
ataggcccatttgtctcccctgc

SEQ ID NO: 2249 - DNA, 23 bp, synthetic construct
  source 1..23: mol_type = other DNA
ataggcccatttgtctcccctgc

SEQ ID NO: 2250 - DNA, 23 bp, synthetic construct
  source 1..23: mol_type = other DNA
ctctgcaggttggtgtaatcagc

SEQ ID NO: 2251 - DNA, 23 bp, synthetic construct
  source 1..23: mol_type = other DNA
ctctgcaggttggtgtaatcagc

SEQ ID NO: 2252 - DNA, 23 bp, synthetic construct
  source 1..23: mol_type = other DNA
ctcgcttacctccagacaagagg

SEQ ID NO: 2253 - DNA, 23 bp, synthetic construct
  source 1..23: mol_type = other DNA
ctcgcttacctccagacaagagg

SEQ ID NO: 2254 - DNA, 23 bp, synthetic construct
  source 1..23: mol_type = other DNA
caaaggtcaccttggcaggaagg

SEQ ID NO: 2255 - DNA, 23 bp, synthetic construct
  source 1..23: mol_type = other DNA
caaaggtcaccttggcaggaagg

SEQ ID NO: 2256 - DNA, 23 bp, synthetic construct
  source 1..23: mol_type = other DNA
ccttctgaccatcagtcatgagg

SEQ ID NO: 2257 - DNA, 23 bp, synthetic construct
  source 1..23: mol_type = other DNA
ccttctgaccatcagtcatgagg

SEQ ID NO: 2258 - DNA, 23 bp, synthetic construct
  source 1..23: mol_type = other DNA
tcacccagataatcctcccttgg

SEQ ID NO: 2259 - DNA, 23 bp, synthetic construct
  source 1..23: mol_type = other DNA
tcacccagataatcctcccttgg

SEQ ID NO: 2260 - DNA, 23 bp, synthetic construct
  source 1..23: mol_type = other DNA
gcttacaatgactgagatcttgg

SEQ ID NO: 2261 - DNA, 23 bp, synthetic construct
  source 1..23: mol_type = other DNA
gcttacaatgactgagatcttgg

SEQ ID NO: 2262 - DNA, 23 bp, synthetic construct
  source 1..23: mol_type = other DNA
cttactttgttgctggcaagtgg

SEQ ID NO: 2263 - DNA, 23 bp, synthetic construct
  source 1..23: mol_type = other DNA
cttactttgttgctggcaagtgg

SEQ ID NO: 2264 - DNA, 23 bp, synthetic construct
  source 1..23: mol_type = other DNA
tctcacctctgcaagtattgggg

SEQ ID NO: 2265 - DNA, 23 bp, synthetic construct
  source 1..23: mol_type = other DNA
tctcacctctgcaagtattgggg

SEQ ID NO: 2266 - DNA, 23 bp, synthetic construct
  source 1..23: mol_type = other DNA
cacccacaggtggcaagttatgg

SEQ ID NO: 2267 - DNA, 23 bp, synthetic construct
  source 1..23: mol_type = other DNA
cacccacaggtggcaagttatgg

SEQ ID NO: 2268 - DNA, 23 bp, synthetic construct
  source 1..23: mol_type = other DNA
acagaccacaagttgaagtcagg

SEQ ID NO: 2269 - DNA, 23 bp, synthetic construct
  source 1..23: mol_type = other DNA
acagaccacaagttgaagtcagg

SEQ ID NO: 2270 - DNA, 23 bp, synthetic construct
  source 1..23: mol_type = other DNA
tctgcaggattgcacaacatggg

SEQ ID NO: 2271 - DNA, 23 bp, synthetic construct
  source 1..23: mol_type = other DNA
tctgcaggattgcacaacatggg

SEQ ID NO: 2272 - DNA, 23 bp, synthetic construct
  source 1..23: mol_type = other DNA
gcaggattgcacaacatgggcgg

SEQ ID NO: 2273 - DNA, 23 bp, synthetic construct
  source 1..23: mol_type = other DNA
gcaggattgcacaacatgggcgg

SEQ ID NO: 2274 - DNA, 23 bp, synthetic construct
  source 1..23: mol_type = other DNA
ccctcagatgtctatgtgtttgg

SEQ ID NO: 2275 - DNA, 23 bp, synthetic construct
  source 1..23: mol_type = other DNA
ccctcagatgtctatgtgtttgg

SEQ ID NO: 2276 - DNA, 23 bp, synthetic construct
  source 1..23: mol_type = other DNA
cctcagatgtctatgtgtttggg

SEQ ID NO: 2277 - DNA, 23 bp, synthetic construct
  source 1..23: mol_type = other DNA
cctcagatgtctatgtgtttggg

SEQ ID NO: 2278 - DNA, 23 bp, synthetic construct
  source 1..23: mol_type = other DNA
ctcagatgtctatgtgtttgggg

SEQ ID NO: 2279 - DNA, 23 bp, synthetic construct
  source 1..23: mol_type = other DNA
ctcagatgtctatgtgtttgggg

SEQ ID NO: 2280 - DNA, 23 bp, synthetic construct
  source 1..23: mol_type = other DNA
gtgtccccagcgcccttcaaagg

SEQ ID NO: 2281 - DNA, 23 bp, synthetic construct
  source 1..23: mol_type = other DNA
gtgtccccagcgcccttcaaagg

SEQ ID NO: 2282 - DNA, 23 bp, synthetic construct
  source 1..23: mol_type = other DNA
tgtccccagcgcccttcaaaggg

SEQ ID NO: 2283 - DNA, 23 bp, synthetic construct
  source 1..23: mol_type = other DNA
tgtccccagcgcccttcaaaggg

SEQ ID NO: 2284 - DNA, 23 bp, synthetic construct
  source 1..23: mol_type = other DNA
ctacttcaggaggggagaagcgg

SEQ ID NO: 2285 - DNA, 23 bp, synthetic construct
  source 1..23: mol_type = other DNA
ctacttcaggaggggagaagcgg

SEQ ID NO: 2286 - DNA, 23 bp, synthetic construct
  source 1..23: mol_type = other DNA
tacttcaggaggggagaagcggg

SEQ ID NO: 2287 - DNA, 23 bp, synthetic construct
  source 1..23: mol_type = other DNA
tacttcaggaggggagaagcggg

SEQ ID NO: 2288 - DNA, 23 bp, synthetic construct
  source 1..23: mol_type = other DNA
ctccttgcaggtgattctggcgg

SEQ ID NO: 2289 - DNA, 23 bp, synthetic construct
  source 1..23: mol_type = other DNA
ctccttgcaggtgattctggcgg

SEQ ID NO: 2290 - DNA, 23 bp, synthetic construct
  source 1..23: mol_type = other DNA
tgcaggttggtgtaatcagctgg

SEQ ID NO: 2291 - DNA, 23 bp, synthetic construct
  source 1..23: mol_type = other DNA
tgcaggttggtgtaatcagctgg

SEQ ID NO: 2292 - DNA, 23 bp, synthetic construct
  source 1..23: mol_type = other DNA
gcaggttggtgtaatcagctggg

SEQ ID NO: 2293 - DNA, 23 bp, synthetic construct
  source 1..23: mol_type = other DNA
gcaggttggtgtaatcagctggg

SEQ ID NO: 2294 - DNA, 27 bp, synthetic construct
  source 1..27: mol_type = other DNA
tcccttctgaccatcagtcatgaggat

SEQ ID NO: 2295 - DNA, 27 bp, synthetic construct
  source 1..27: mol_type = other DNA
tcccttctgaccatcagtcatgaggat

SEQ ID NO: 2296 - DNA, 27 bp, synthetic construct
  source 1..27: mol_type = other DNA
actcacccagataatcctcccttgggt

SEQ ID NO: 2297 - DNA, 27 bp, synthetic construct
  source 1..27: mol_type = other DNA
actcacccagataatcctcccttgggt

SEQ ID NO: 2298 - DNA, 27 bp, synthetic construct
  source 1..27: mol_type = other DNA
ccttacctacgctgaccttgattgagt

SEQ ID NO: 2299 - DNA, 27 bp, synthetic construct
  source 1..27: mol_type = other DNA
ccttacctacgctgaccttgattgagt

SEQ ID NO: 2300 - DNA, 27 bp, synthetic construct
  source 1..27: mol_type = other DNA
ttctctcacctctgcaagtattggggt

SEQ ID NO: 2301 - DNA, 27 bp, synthetic construct
  source 1..27: mol_type = other DNA
ttctctcacctctgcaagtattggggt

SEQ ID NO: 2302 - DNA, 27 bp, synthetic construct
  source 1..27: mol_type = other DNA
tccctcagatgtctatgtgtttggggt

SEQ ID NO: 2303 - DNA, 27 bp, synthetic construct
  source 1..27: mol_type = other DNA
tccctcagatgtctatgtgtttggggt

SEQ ID NO: 2304 - DNA, 27 bp, synthetic construct
  source 1..27: mol_type = other DNA
ctgccagatgaaagccagtctctgagt

SEQ ID NO: 2305 - DNA, 27 bp, synthetic construct
  source 1..27: mol_type = other DNA
ctgccagatgaaagccagtctctgagt

SEQ ID NO: 2306 - DNA, 27 bp, synthetic construct
  source 1..27: mol_type = other DNA
atgcttctcacctccgttgtcacagat

SEQ ID NO: 2307 - DNA, 27 bp, synthetic construct
  source 1..27: mol_type = other DNA
atgcttctcacctccgttgtcacagat

SEQ ID NO: 2308 - DNA, 27 bp, synthetic construct
  source 1..27: mol_type = other DNA
aggaggattccaccttctcaattaagt

SEQ ID NO: 2309 - DNA, 27 bp, synthetic construct
  source 1..27: mol_type = other DNA
aggaggattccaccttctcaattaagt

SEQ ID NO: 2310 - DNA, 27 bp, synthetic construct
  source 1..27: mol_type = other DNA
ccctaacctctgaccttcataattgat

SEQ ID NO: 2311 - DNA, 27 bp, synthetic construct
  source 1..27: mol_type = other DNA
ccctaacctctgaccttcataattgat

SEQ ID NO: 2312 - DNA, 27 bp, synthetic construct
  source 1..27: mol_type = other DNA
cttctgaccatcagtcatgaggatgat

SEQ ID NO: 2313 - DNA, 27 bp, synthetic construct
  source 1..27: mol_type = other DNA
cttctgaccatcagtcatgaggatgat

SEQ ID NO: 2314 - DNA, 27 bp, synthetic construct
  source 1..27: mol_type = other DNA
cttgtatctccctaccgatcatttggt

SEQ ID NO: 2315 - DNA, 27 bp, synthetic construct
  source 1..27: mol_type = other DNA
cttgtatctccctaccgatcatttggt

SEQ ID NO: 2316 - DNA, 27 bp, synthetic construct
  source 1..27: mol_type = other DNA
ggattctgtgcttacaatgactgagat

SEQ ID NO: 2317 - DNA, 27 bp, synthetic construct
  source 1..27: mol_type = other DNA
ggattctgtgcttacaatgactgagat

SEQ ID NO: 2318 - DNA, 27 bp, synthetic construct
  source 1..27: mol_type = other DNA
tgcatccttacctacgctgaccttgat

SEQ ID NO: 2319 - DNA, 27 bp, synthetic construct
  source 1..27: mol_type = other DNA
tgcatccttacctacgctgaccttgat

SEQ ID NO: 2320 - DNA, 27 bp, synthetic construct
  source 1..27: mol_type = other DNA
tgtcttactttgttgctggcaagtggt

SEQ ID NO: 2321 - DNA, 27 bp, synthetic construct
  source 1..27: mol_type = other DNA
tgtcttactttgttgctggcaagtggt

SEQ ID NO: 2322 - DNA, 27 bp, synthetic construct
  source 1..27: mol_type = other DNA
gtatgtcttactttgttgctggcaagt

SEQ ID NO: 2323 - DNA, 27 bp, synthetic construct
  source 1..27: mol_type = other DNA
gtatgtcttactttgttgctggcaagt

SEQ ID NO: 2324 - DNA, 27 bp, synthetic construct
  source 1..27: mol_type = other DNA
cttcaggtgtgaccaccactccatggt

SEQ ID NO: 2325 - DNA, 27 bp, synthetic construct
  source 1..27: mol_type = other DNA
cttcaggtgtgaccaccactccatggt

SEQ ID NO: 2326 - DNA, 27 bp, synthetic construct
  source 1..27: mol_type = other DNA
ccctctccacagaccacaagttgaagt

SEQ ID NO: 2327 - DNA, 27 bp, synthetic construct
  source 1..27: mol_type = other DNA
ccctctccacagaccacaagttgaagt

SEQ ID NO: 2328 - DNA, 27 bp, synthetic construct
  source 1..27: mol_type = other DNA
ctacagaaaggcagctgtgagagagat

SEQ ID NO: 2329 - DNA, 27 bp, synthetic construct
  source 1..27: mol_type = other DNA
ctacagaaaggcagctgtgagagagat

SEQ ID NO: 2330 - DNA, 27 bp, synthetic construct
  source 1..27: mol_type = other DNA
tgttgttcccctgggtgccaggagagt

SEQ ID NO: 2331 - DNA, 27 bp, synthetic construct
  source 1..27: mol_type = other DNA
tgttgttcccctgggtgccaggagagt

SEQ ID NO: 2332 - DNA, 27 bp, synthetic construct
  source 1..27: mol_type = other DNA
gacatctgagggataaaaaggaaggat

SEQ ID NO: 2333 - DNA, 27 bp, synthetic construct
  source 1..27: mol_type = other DNA
gacatctgagggataaaaaggaaggat

SEQ ID NO: 2334 - DNA, 27 bp, synthetic construct
  source 1..27: mol_type = other DNA
ggctttcatctggcagagaaggagaat

SEQ ID NO: 2335 - DNA, 27 bp, synthetic construct
  source 1..27: mol_type = other DNA
ggctttcatctggcagagaaggagaat

SEQ ID NO: 2336 - DNA, 27 bp, synthetic construct
  source 1..27: mol_type = other DNA
tacaccaacctgcagaggcagtggggt

SEQ ID NO: 2337 - DNA, 27 bp, synthetic construct
  source 1..27: mol_type = other DNA
tacaccaacctgcagaggcagtggggt

SEQ ID NO: 2338 - DNA, 27 bp, synthetic construct
  source 1..27: mol_type = other DNA
cttacctccagacaagaggcccaagat

SEQ ID NO: 2339 - DNA, 27 bp, synthetic construct
  source 1..27: mol_type = other DNA
cttacctccagacaagaggcccaagat

SEQ ID NO: 2340 - DNA, 27 bp, synthetic construct
  source 1..27: mol_type = other DNA
tggtcacacctgaagagaaaggctgat

SEQ ID NO: 2341 - DNA, 27 bp, synthetic construct
  source 1..27: mol_type = other DNA
tggtcacacctgaagagaaaggctgat

SEQ ID NO: 2342 - DNA, 27 bp, synthetic construct
  source 1..27: mol_type = other DNA
ggattgctttgagaaggggggacaagt

SEQ ID NO: 2343 - DNA, 27 bp, synthetic construct
  source 1..27: mol_type = other DNA
ggattgctttgagaaggggggacaagt

SEQ ID NO: 2344 - DNA, 27 bp, synthetic construct
  source 1..27: mol_type = other DNA
cgctgcagaggtatgagacatcgaggt

SEQ ID NO: 2345 - DNA, 27 bp, synthetic construct
  source 1..27: mol_type = other DNA
cgctgcagaggtatgagacatcgaggt

SEQ ID NO: 2346 - DNA, 27 bp, synthetic construct
  source 1..27: mol_type = other DNA
ggagtctgggagagtcagaaatgaggt

SEQ ID NO: 2347 - DNA, 27 bp, synthetic construct
  source 1..27: mol_type = other DNA
ggagtctgggagagtcagaaatgaggt

SEQ ID NO: 2348 - DNA, 27 bp, synthetic construct
  source 1..27: mol_type = other DNA
atgaaggagtctgggagagtcagaaat

SEQ ID NO: 2349 - DNA, 27 bp, synthetic construct
  source 1..27: mol_type = other DNA
atgaaggagtctgggagagtcagaaat

SEQ ID NO: 2350 - DNA, 27 bp, synthetic construct
  source 1..27: mol_type = other DNA
tttgaagggcgctggggacacaacagt

SEQ ID NO: 2351 - DNA, 27 bp, synthetic construct
  source 1..27: mol_type = other DNA
tttgaagggcgctggggacacaacagt

SEQ ID NO: 2352 - DNA, 27 bp, synthetic construct
  source 1..27: mol_type = other DNA
ctcccctcctgaagtaggagagtaggt

SEQ ID NO: 2353 - DNA, 27 bp, synthetic construct
  source 1..27: mol_type = other DNA
ctcccctcctgaagtaggagagtaggt

SEQ ID NO: 2354 - DNA, 27 bp, synthetic construct
  source 1..27: mol_type = other DNA
cttactttgttgctggcaagtggtagt

SEQ ID NO: 2355 - DNA, 27 bp, synthetic construct
  source 1..27: mol_type = other DNA
cttactttgttgctggcaagtggtagt

SEQ ID NO: 2356 - DNA, 23 bp, synthetic construct
  source 1..23: mol_type = other DNA
actccatcggccattcacttggc

SEQ ID NO: 2357 - DNA, 23 bp, synthetic construct
  source 1..23: mol_type = other DNA
acccaaattttggggtatgtggc

SEQ ID NO: 2358 - DNA, 23 bp, synthetic construct
  source 1..23: mol_type = other DNA
cgtgacccagtctgcattactgc

SEQ ID NO: 2359 - DNA, 23 bp, synthetic construct
  source 1..23: mol_type = other DNA
gaccaaaagactgtcaggaaggc

SEQ ID NO: 2360 - DNA, 23 bp, synthetic construct
  source 1..23: mol_type = other DNA
ggccgatggagtgggcagacagc

SEQ ID NO: 2361 - DNA, 23 bp, synthetic construct
  source 1..23: mol_type = other DNA
acccctcaagaggtggccgaagc

SEQ ID NO: 2362 - DNA, 23 bp, synthetic construct
  source 1..23: mol_type = other DNA
aggccctccaggcagtgtacagc

SEQ ID NO: 2363 - DNA, 23 bp, synthetic construct
  source 1..23: mol_type = other DNA
tggccagactatcaggtgagagc

SEQ ID NO: 2364 - DNA, 23 bp, synthetic construct
  source 1..23: mol_type = other DNA
caacaaagtaagacatacttggc

SEQ ID NO: 2365 - DNA, 23 bp, synthetic construct
  source 1..23: mol_type = other DNA
caaaagcaggtacctgctcacgc

SEQ ID NO: 2366 - DNA, 23 bp, synthetic construct
  source 1..23: mol_type = other DNA
cctctttcaagtgctgccctggc

SEQ ID NO: 2367 - DNA, 27 bp, synthetic construct
  source 1..27: mol_type = other DNA
gagaaactccaagatgaggatttgggt

SEQ ID NO: 2368 - DNA, 27 bp, synthetic construct
  source 1..27: mol_type = other DNA
ctgccatggttgcttgtggtaatcggt

SEQ ID NO: 2369 - DNA, 27 bp, synthetic construct
  source 1..27: mol_type = other DNA
ttctccaagagggccaggcactggagt

SEQ ID NO: 2370 - DNA, 27 bp, synthetic construct
  source 1..27: mol_type = other DNA
accctgtgcagacacgtacctgcagat

SEQ ID NO: 2371 - DNA, 27 bp, synthetic construct
  source 1..27: mol_type = other DNA
accaaaagactgtcaggaaggcagagt

SEQ ID NO: 2372 - DNA, 27 bp, synthetic construct
  source 1..27: mol_type = other DNA
acctgccaagtgaatggccgatggagt

SEQ ID NO: 2373 - DNA, 27 bp, synthetic construct
  source 1..27: mol_type = other DNA
agacaatgagcaacatgtgttcaaagt

SEQ ID NO: 2374 - DNA, 27 bp, synthetic construct
  source 1..27: mol_type = other DNA
gagcaacatgtgttcaaagtcaaggat

SEQ ID NO: 2375 - DNA, 27 bp, synthetic construct
  source 1..27: mol_type = other DNA
ccacaagcaaccatggcaggccaagat

SEQ ID NO: 2376 - DNA, 27 bp, synthetic construct
  source 1..27: mol_type = other DNA
caaaaaccagaagcggcaaaagcaggt

SEQ ID NO: 2377 - DNA, 27 bp, synthetic construct
  source 1..27: mol_type = other DNA
gagaaactccaagatgaggatttgggt

SEQ ID NO: 2378 - DNA, 23 bp, synthetic construct
  source 1..23: mol_type = other DNA
agggtgctccaggaccccgtaga

SEQ ID NO: 2379 - DNA, 23 bp, synthetic construct
  source 1..23: mol_type = other DNA
gggccagtattccccgttctcga

SEQ ID NO: 2380 - DNA, 23 bp, synthetic construct
  source 1..23: mol_type = other DNA
cgctccaagagccaccttcctga

SEQ ID NO: 2381 - DNA, 23 bp, synthetic construct
  source 1..23: mol_type = other DNA
gcggttccagccttcaggaggga

SEQ ID NO: 2382 - DNA, 23 bp, synthetic construct
  source 1..23: mol_type = other DNA
gttcccaaaccatgccacagaga

SEQ ID NO: 2383 - DNA, 23 bp, synthetic construct
  source 1..23: mol_type = other DNA
gtgttcccaaaccatgccacaga

SEQ ID NO: 2384 - DNA, 23 bp, synthetic construct
  source 1..23: mol_type = other DNA
cagccagggcagcacttgaaaga

SEQ ID NO: 2385 - DNA, 23 bp, synthetic construct
  source 1..23: mol_type = other DNA
ccttcagccagggcagcacttga

SEQ ID NO: 2386 - DNA, 23 bp, synthetic construct
  source 1..23: mol_type = other DNA
ccccagggatcctgctctctgga

SEQ ID NO: 2387 - DNA, 23 bp, synthetic construct
  source 1..23: mol_type = other DNA
tcaagaccaaaagactgtcagga

SEQ ID NO: 2388 - DNA, 23 bp, synthetic construct
  source 1..23: mol_type = other DNA
gcacctgccaagtgaatggccga

SEQ ID NO: 2389 - DNA, 23 bp, synthetic construct
  source 1..23: mol_type = other DNA
ctgccaagtgaatggccgatgga

SEQ ID NO: 2390 - DNA, 23 bp, synthetic construct
  source 1..23: mol_type = other DNA
gaatggccgatggagtgggcaga

SEQ ID NO: 2391 - DNA, 23 bp, synthetic construct
  source 1..23: mol_type = other DNA
agtgggcagacagcgatctgtga

SEQ ID NO: 2392 - DNA, 23 bp, synthetic construct
  source 1..23: mol_type = other DNA
ggcagccagtaccgccttgaaga

SEQ ID NO: 2393 - DNA, 23 bp, synthetic construct
  source 1..23: mol_type = other DNA
tcccagcggcgaacgtgtcagga

SEQ ID NO: 2394 - DNA, 23 bp, synthetic construct
  source 1..23: mol_type = other DNA
gtgtcaggaaggtggctcttgga

SEQ ID NO: 2395 - DNA, 23 bp, synthetic construct
  source 1..23: mol_type = other DNA
aggggaacaacagaagcggaaga

SEQ ID NO: 2396 - DNA, 23 bp, synthetic construct
  source 1..23: mol_type = other DNA
cctccaggcagtgtacagcatga

SEQ ID NO: 2397 - DNA, 23 bp, synthetic construct
  source 1..23: mol_type = other DNA
ttctaccaaatgatcggtaggga

SEQ ID NO: 2398 - DNA, 23 bp, synthetic construct
  source 1..23: mol_type = other DNA
ctaccaaatgatcggtagggaga

SEQ ID NO: 2399 - DNA, 23 bp, synthetic construct
  source 1..23: mol_type = other DNA
caagcaaccatggcaggccaaga

SEQ ID NO: 2400 - DNA, 23 bp, synthetic construct
  source 1..23: mol_type = other DNA
tatggccagactatcaggtgaga

SEQ ID NO: 2401 - DNA, 23 bp, synthetic construct
  source 1..23: mol_type = other DNA
cacttgccagcaacaaagtaaga

SEQ ID NO: 2402 - DNA, 23 bp, synthetic construct
  source 1..23: mol_type = other DNA
gctcaatatgccccaggctatga

SEQ ID NO: 2403 - DNA, 23 bp, synthetic construct
  source 1..23: mol_type = other DNA
ctttcaagtgctgccctggctga

SEQ ID NO: 2404 - DNA, 23 bp, synthetic construct
  source 1..23: mol_type = other DNA
cactccatcggccattcacttgg

SEQ ID NO: 2405 - DNA, 23 bp, synthetic construct
  source 1..23: mol_type = other DNA
gacccaaattttggggtatgtgg

SEQ ID NO: 2406 - DNA, 23 bp, synthetic construct
  source 1..23: mol_type = other DNA
tgcggttccagccttcaggaggg

SEQ ID NO: 2407 - DNA, 23 bp, synthetic construct
  source 1..23: mol_type = other DNA
gtgcggttccagccttcaggagg

SEQ ID NO: 2408 - DNA, 23 bp, synthetic construct
  source 1..23: mol_type = other DNA
tggcctgccatggttgcttgtgg

SEQ ID NO: 2409 - DNA, 23 bp, synthetic construct
  source 1..23: mol_type = other DNA
ctccttccgacttctccaagagg

SEQ ID NO: 2410 - DNA, 23 bp, synthetic construct
  source 1..23: mol_type = other DNA
tccttccgacttctccaagaggg

SEQ ID NO: 2411 - DNA, 23 bp, synthetic construct
  source 1..23: mol_type = other DNA
tctccaagagggccaggcactgg

SEQ ID NO: 2412 - DNA, 23 bp, synthetic construct
  source 1..23: mol_type = other DNA
ctcaagaccaaaagactgtcagg

SEQ ID NO: 2413 - DNA, 23 bp, synthetic construct
  source 1..23: mol_type = other DNA
agaccaaaagactgtcaggaagg

SEQ ID NO: 2414 - DNA, 23 bp, synthetic construct
  source 1..23: mol_type = other DNA
cctgccaagtgaatggccgatgg

SEQ ID NO: 2415 - DNA, 23 bp, synthetic construct
  source 1..23: mol_type = other DNA
ctcccagcggcgaacgtgtcagg

SEQ ID NO: 2416 - DNA, 23 bp, synthetic construct
  source 1..23: mol_type = other DNA
cagcggcgaacgtgtcaggaagg

SEQ ID NO: 2417 - DNA, 23 bp, synthetic construct
  source 1..23: mol_type = other DNA
cggcgaacgtgtcaggaaggtgg

SEQ ID NO: 2418 - DNA, 23 bp, synthetic construct
  source 1..23: mol_type = other DNA
cgtgtcaggaaggtggctcttgg

SEQ ID NO: 2419 - DNA, 23 bp, synthetic construct
  source 1..23: mol_type = other DNA
ttttctaccaaatgatcggtagg

SEQ ID NO: 2420 - DNA, 23 bp, synthetic construct
  source 1..23: mol_type = other DNA
tttctaccaaatgatcggtaggg

SEQ ID NO: 2421 - DNA, 23 bp, synthetic construct
  source 1..23: mol_type = other DNA
gcaacaaagtaagacatacttgg

SEQ ID NO: 2422 - DNA, 23 bp, synthetic construct
  source 1..23: mol_type = other DNA
acctctttcaagtgctgccctgg

SEQ ID NO: 2423 - DNA, 23 bp, synthetic construct
  source 1..23: mol_type = other DNA
gaaactccaagatgaggatttgg

SEQ ID NO: 2424 - DNA, 23 bp, synthetic construct
  source 1..23: mol_type = other DNA
aaactccaagatgaggatttggg

SEQ ID NO: 2425 - DNA, 27 bp, synthetic construct
  source 1..27: mol_type = other DNA
ttctccaagagggccaggcactggagt

SEQ ID NO: 2426 - DNA, 27 bp, synthetic construct
  source 1..27: mol_type = other DNA
ttctccaagagggccaggcactggagt

SEQ ID NO: 2427 - DNA, 27 bp, synthetic construct
  source 1..27: mol_type = other DNA
accaaaagactgtcaggaaggcagagt

SEQ ID NO: 2428 - DNA, 27 bp, synthetic construct
  source 1..27: mol_type = other DNA
accaaaagactgtcaggaaggcagagt

SEQ ID NO: 2429 - DNA, 27 bp, synthetic construct
  source 1..27: mol_type = other DNA
acctgccaagtgaatggccgatggagt

SEQ ID NO: 2430 - DNA, 27 bp, synthetic construct
  source 1..27: mol_type = other DNA
acctgccaagtgaatggccgatggagt

SEQ ID NO: 2431 - DNA, 27 bp, synthetic construct
  source 1..27: mol_type = other DNA
gagcaacatgtgttcaaagtcaaggat

SEQ ID NO: 2432 - DNA, 27 bp, synthetic construct
  source 1..27: mol_type = other DNA
gagcaacatgtgttcaaagtcaaggat

SEQ ID NO: 2433 - DNA, 27 bp, synthetic construct
  source 1..27: mol_type = other DNA
gctccaggaccccgtagatctgcaggt

SEQ ID NO: 2434 - DNA, 27 bp, synthetic construct
  source 1..27: mol_type = other DNA
gctccaggaccccgtagatctgcaggt

SEQ ID NO: 2435 - DNA, 27 bp, synthetic construct
  source 1..27: mol_type = other DNA
ttcagggtgctccaggaccccgtagat

SEQ ID NO: 2436 - DNA, 27 bp, synthetic construct
  source 1..27: mol_type = other DNA
ttcagggtgctccaggaccccgtagat

SEQ ID NO: 2437 - DNA, 27 bp, synthetic construct
  source 1..27: mol_type = other DNA
ggggccagtattccccgttctcgaagt

SEQ ID NO: 2438 - DNA, 27 bp, synthetic construct
  source 1..27: mol_type = other DNA
ggggccagtattccccgttctcgaagt

SEQ ID NO: 2439 - DNA, 27 bp, synthetic construct
  source 1..27: mol_type = other DNA
actccatcggccattcacttggcaggt

SEQ ID NO: 2440 - DNA, 27 bp, synthetic construct
  source 1..27: mol_type = other DNA
actccatcggccattcacttggcaggt

SEQ ID NO: 2441 - DNA, 27 bp, synthetic construct
  source 1..27: mol_type = other DNA
tggcctgccatggttgcttgtggtaat

SEQ ID NO: 2442 - DNA, 27 bp, synthetic construct
  source 1..27: mol_type = other DNA
tggcctgccatggttgcttgtggtaat

SEQ ID NO: 2443 - DNA, 27 bp, synthetic construct
  source 1..27: mol_type = other DNA
tcttggcctgccatggttgcttgtggt

SEQ ID NO: 2444 - DNA, 27 bp, synthetic construct
  source 1..27: mol_type = other DNA
tcttggcctgccatggttgcttgtggt

SEQ ID NO: 2445 - DNA, 27 bp, synthetic construct
  source 1..27: mol_type = other DNA
tcagccagggcagcacttgaaagaggt

SEQ ID NO: 2446 - DNA, 27 bp, synthetic construct
  source 1..27: mol_type = other DNA
tcagccagggcagcacttgaaagaggt

SEQ ID NO: 2447 - DNA, 27 bp, synthetic construct
  source 1..27: mol_type = other DNA
atcgcacctgccaagtgaatggccgat

SEQ ID NO: 2448 - DNA, 27 bp, synthetic construct
  source 1..27: mol_type = other DNA
atcgcacctgccaagtgaatggccgat

SEQ ID NO: 2449 - DNA, 27 bp, synthetic construct
  source 1..27: mol_type = other DNA
tggccgatggagtgggcagacagcgat

SEQ ID NO: 2450 - DNA, 27 bp, synthetic construct
  source 1..27: mol_type = other DNA
tggccgatggagtgggcagacagcgat

SEQ ID NO: 2451 - DNA, 27 bp, synthetic construct
  source 1..27: mol_type = other DNA
tcccagcggcgaacgtgtcaggaaggt

SEQ ID NO: 2452 - DNA, 27 bp, synthetic construct
  source 1..27: mol_type = other DNA
tcccagcggcgaacgtgtcaggaaggt

SEQ ID NO: 2453 - DNA, 27 bp, synthetic construct
  source 1..27: mol_type = other DNA
cccaggggaacaacagaagcggaagat

SEQ ID NO: 2454 - DNA, 27 bp, synthetic construct
  source 1..27: mol_type = other DNA
cccaggggaacaacagaagcggaagat

SEQ ID NO: 2455 - DNA, 27 bp, synthetic construct
  source 1..27: mol_type = other DNA
gtcacgaagcagctcaatgaaatcaat

SEQ ID NO: 2456 - DNA, 27 bp, synthetic construct
  source 1..27: mol_type = other DNA
gtcacgaagcagctcaatgaaatcaat

SEQ ID NO: 2457 - DNA, 27 bp, synthetic construct
  source 1..27: mol_type = other DNA
ggccctccaggcagtgtacagcatgat

SEQ ID NO: 2458 - DNA, 27 bp, synthetic construct
  source 1..27: mol_type = other DNA
ggccctccaggcagtgtacagcatgat

SEQ ID NO: 2459 - DNA, 27 bp, synthetic construct
  source 1..27: mol_type = other DNA
tttctaccaaatgatcggtagggagat

SEQ ID NO: 2460 - DNA, 27 bp, synthetic construct
  source 1..27: mol_type = other DNA
tttctaccaaatgatcggtagggagat

SEQ ID NO: 2461 - DNA, 27 bp, synthetic construct
  source 1..27: mol_type = other DNA
gcaaccatggcaggccaagatctcagt

SEQ ID NO: 2462 - DNA, 27 bp, synthetic construct
  source 1..27: mol_type = other DNA
gcaaccatggcaggccaagatctcagt

SEQ ID NO: 2463 - RNA, 20 nt, synthetic construct
  source 1..20: mol_type = other RNA
cttctcacctccgttgtcac

SEQ ID NO: 2464 - RNA, 20 nt, synthetic construct
  source 1..20: mol_type = other RNA
ctgaccatcagtcatgagga

SEQ ID NO: 2465 - RNA, 20 nt, synthetic construct
  source 1..20: mol_type = other RNA
ctccctaccgatcatttggt

SEQ ID NO: 2466 - RNA, 20 nt, synthetic construct
  source 1..20: mol_type = other RNA
ttacctacgctgaccttgat

SEQ ID NO: 2467 - RNA, 20 nt, synthetic construct
  source 1..20: mol_type = other RNA
atccttacctacgctgacct

SEQ ID NO: 2468 - RNA, 20 nt, synthetic construct
  source 1..20: mol_type = other RNA
tctcaccttatccccattct

SEQ ID NO: 2469 - RNA, 20 nt, synthetic construct
  source 1..20: mol_type = other RNA
tcgcttacctccagacaaga

SEQ ID NO: 2470 - RNA, 20 nt, synthetic construct
  source 1..20: mol_type = other RNA
tcacctccgttgtcacagat

SEQ ID NO: 2471 - RNA, 20 nt, synthetic construct
  source 1..20: mol_type = other RNA
cttacaatgactgagatctt

SEQ ID NO: 2472 - RNA, 20 nt, synthetic construct
  source 1..20: mol_type = other RNA
aacctgcagaggcagtgggg

SEQ ID NO: 2473 - RNA, 20 nt, synthetic construct
  source 1..20: mol_type = other RNA
ctcgcttacctccagacaag

SEQ ID NO: 2474 - RNA, 20 nt, synthetic construct
  source 1..20: mol_type = other RNA
ccttctgaccatcagtcatg

SEQ ID NO: 2475 - RNA, 20 nt, synthetic construct
  source 1..20: mol_type = other RNA
tcacccagataatcctccct

SEQ ID NO: 2476 - RNA, 20 nt, synthetic construct
  source 1..20: mol_type = other RNA
gcttacaatgactgagatct

SEQ ID NO: 2477 - RNA, 20 nt, synthetic construct
  source 1..20: mol_type = other RNA
cttactttgttgctggcaag

SEQ ID NO: 2478 - RNA, 20 nt, synthetic construct
  source 1..20: mol_type = other RNA
tctcacctctgcaagtattg

SEQ ID NO: 2479 - RNA, 20 nt, synthetic construct
  source 1..20: mol_type = other RNA
ccctcgcttacctccagaca

SEQ ID NO: 2480 - RNA, 20 nt, synthetic construct
  source 1..20: mol_type = other RNA
cttctcacctccgttgtcac

SEQ ID NO: 2481 - RNA, 20 nt, synthetic construct
  source 1..20: mol_type = other RNA
ggtcaaaggtcaccttggca

SEQ ID NO: 2482 - RNA, 20 nt, synthetic construct
  source 1..20: mol_type = other RNA
ttccaccttctcaattaagt

SEQ ID NO: 2483 - RNA, 20 nt, synthetic construct
  source 1..20: mol_type = other RNA
taacctctgaccttcataat

SEQ ID NO: 2484 - RNA, 20 nt, synthetic construct
  source 1..20: mol_type = other RNA
ctgaccatcagtcatgagga

SEQ ID NO: 2485 - RNA, 20 nt, synthetic construct
  source 1..20: mol_type = other RNA
cttctgaccatcagtcatga

SEQ ID NO: 2486 - RNA, 20 nt, synthetic construct
  source 1..20: mol_type = other RNA
tcccttctgaccatcagtca

SEQ ID NO: 2487 - RNA, 20 nt, synthetic construct
  source 1..20: mol_type = other RNA
ctccctaccgatcatttggt

SEQ ID NO: 2488 - RNA, 20 nt, synthetic construct
  source 1..20: mol_type = other RNA
ttctgtgcttacaatgactg

SEQ ID NO: 2489 - RNA, 20 nt, synthetic construct
  source 1..20: mol_type = other RNA
ttacctacgctgaccttgat

SEQ ID NO: 2490 - RNA, 20 nt, synthetic construct
  source 1..20: mol_type = other RNA
atccttacctacgctgacct

SEQ ID NO: 2491 - RNA, 20 nt, synthetic construct
  source 1..20: mol_type = other RNA
tctcaccttatccccattct

SEQ ID NO: 2492 - RNA, 20 nt, synthetic construct
  source 1..20: mol_type = other RNA
gaggactcacttgaatgaaa

SEQ ID NO: 2493 - RNA, 20 nt, synthetic construct
  source 1..20: mol_type = other RNA
tcaaagcaatccactgtcca

SEQ ID NO: 2494 - RNA, 20 nt, synthetic construct
  source 1..20: mol_type = other RNA
ctcccagactccttcatgta

SEQ ID NO: 2495 - RNA, 20 nt, synthetic construct
  source 1..20: mol_type = other RNA
ctggcacccaggggaacaac

SEQ ID NO: 2496 - RNA, 20 nt, synthetic construct
  source 1..20: mol_type = other RNA
cccaggggaacaacagaagc

SEQ ID NO: 2497 - RNA, 20 nt, synthetic construct
  source 1..20: mol_type = other RNA
acaggtggcaagttatggtg

SEQ ID NO: 2498 - RNA, 20 nt, synthetic construct
  source 1..20: mol_type = other RNA
cctctccacagaccacaagt

SEQ ID NO: 2499 - RNA, 20 nt, synthetic construct
  source 1..20: mol_type = other RNA
gccagatgaaagccagtctc

SEQ ID NO: 2500 - RNA, 20 nt, synthetic construct
  source 1..20: mol_type = other RNA
gtccccagcgcccttcaaag

SEQ ID NO: 2501 - RNA, 20 nt, synthetic construct
  source 1..20: mol_type = other RNA
acttcaggaggggagaagcg

SEQ ID NO: 2502 - RNA, 20 nt, synthetic construct
  source 1..20: mol_type = other RNA
cccctacagaaaggcagctg

SEQ ID NO: 2503 - RNA, 20 nt, synthetic construct
  source 1..20: mol_type = other RNA
cctacagaaaggcagctgtg

SEQ ID NO: 2504 - RNA, 20 nt, synthetic construct
  source 1..20: mol_type = other RNA
tacagaaaggcagctgtgag

SEQ ID NO: 2505 - RNA, 20 nt, synthetic construct
  source 1..20: mol_type = other RNA
ttccaccttctcaattaagt

SEQ ID NO: 2506 - RNA, 20 nt, synthetic construct
  source 1..20: mol_type = other RNA
cttctgaccatcagtcatga

SEQ ID NO: 2507 - RNA, 20 nt, synthetic construct
  source 1..20: mol_type = other RNA
acttcaggaggggagaagcg

SEQ ID NO: 2508 - RNA, 20 nt, synthetic construct
  source 1..20: mol_type = other RNA
cccctacagaaaggcagctg

SEQ ID NO: 2509 - RNA, 20 nt, synthetic construct
  source 1..20: mol_type = other RNA
cctacagaaaggcagctgtg

SEQ ID NO: 2510 - RNA, 20 nt, synthetic construct
  source 1..20: mol_type = other RNA
tcgcttacctccagacaaga

SEQ ID NO: 2511 - RNA, 20 nt, synthetic construct
  source 1..20: mol_type = other RNA
gccctcaaacctctgcactc

SEQ ID NO: 2512 - RNA, 20 nt, synthetic construct
  source 1..20: mol_type = other RNA
tcacctccgttgtcacagat

SEQ ID NO: 2513 - RNA, 20 nt, synthetic construct
  source 1..20: mol_type = other RNA
aaaggtcaccttggcaggaa

SEQ ID NO: 2514 - RNA, 20 nt, synthetic construct
  source 1..20: mol_type = other RNA
ctgtcttcaaacctgggccg

SEQ ID NO: 2515 - RNA, 20 nt, synthetic construct
  source 1..20: mol_type = other RNA
cttacaatgactgagatctt

SEQ ID NO: 2516 - RNA, 20 nt, synthetic construct
  source 1..20: mol_type = other RNA
acgctctcacctgatagtct

SEQ ID NO: 2517 - RNA, 20 nt, synthetic construct
  source 1..20: mol_type = other RNA
gtatgtcttactttgttgct

SEQ ID NO: 2518 - RNA, 20 nt, synthetic construct
  source 1..20: mol_type = other RNA
atacctctgcagcggggtac

SEQ ID NO: 2519 - RNA, 20 nt, synthetic construct
  source 1..20: mol_type = other RNA
gcacccaggggaacaacaga

SEQ ID NO: 2520 - RNA, 20 nt, synthetic construct
  source 1..20: mol_type = other RNA
ctgcaggattgcacaacatg

SEQ ID NO: 2521 - RNA, 20 nt, synthetic construct
  source 1..20: mol_type = other RNA
tcctacttcaggaggggaga

SEQ ID NO: 2522 - RNA, 20 nt, synthetic construct
  source 1..20: mol_type = other RNA
ataggcccatttgtctcccc

SEQ ID NO: 2523 - RNA, 20 nt, synthetic construct
  source 1..20: mol_type = other RNA
tattcgtccagaggaagagc

SEQ ID NO: 2524 - RNA, 20 nt, synthetic construct
  source 1..20: mol_type = other RNA
ccagaggaagagctgctccc

SEQ ID NO: 2525 - RNA, 20 nt, synthetic construct
  source 1..20: mol_type = other RNA
ctctccttgcaggtgattct

SEQ ID NO: 2526 - RNA, 20 nt, synthetic construct
  source 1..20: mol_type = other RNA
tccttgcaggtgattctggc

SEQ ID NO: 2527 - RNA, 20 nt, synthetic construct
  source 1..20: mol_type = other RNA
ctctgcaggttggtgtaatc

SEQ ID NO: 2528 - RNA, 20 nt, synthetic construct
  source 1..20: mol_type = other RNA
gccctcaaacctctgcactc

SEQ ID NO: 2529 - RNA, 20 nt, synthetic construct
  source 1..20: mol_type = other RNA
aaaggtcaccttggcaggaa

SEQ ID NO: 2530 - RNA, 20 nt, synthetic construct
  source 1..20: mol_type = other RNA
gcacccaggggaacaacaga

SEQ ID NO: 2531 - RNA, 20 nt, synthetic construct
  source 1..20: mol_type = other RNA
ccagaggaagagctgctccc

SEQ ID NO: 2532 - RNA, 20 nt, synthetic construct
  source 1..20: mol_type = other RNA
tccttgcaggtgattctggc

SEQ ID NO: 2533 - RNA, 20 nt, synthetic construct
  source 1..20: mol_type = other RNA
ctcgcttacctccagacaag

SEQ ID NO: 2534 - RNA, 20 nt, synthetic construct
  source 1..20: mol_type = other RNA
caaaggtcaccttggcagga

SEQ ID NO: 2535 - RNA, 20 nt, synthetic construct
  source 1..20: mol_type = other RNA
ccttctgaccatcagtcatg

SEQ ID NO: 2536 - RNA, 20 nt, synthetic construct
  source 1..20: mol_type = other RNA
tcacccagataatcctccct

SEQ ID NO: 2537 - RNA, 20 nt, synthetic construct
  source 1..20: mol_type = other RNA
gtatctccctaccgatcatt

SEQ ID NO: 2538 - RNA, 20 nt, synthetic construct
  source 1..20: mol_type = other RNA
gcttacaatgactgagatct

SEQ ID NO: 2539 - RNA, 20 nt, synthetic construct
  source 1..20: mol_type = other RNA
gacgctctcacctgatagtc

SEQ ID NO: 2540 - RNA, 20 nt, synthetic construct
  source 1..20: mol_type = other RNA
cttactttgttgctggcaag

SEQ ID NO: 2541 - RNA, 20 nt, synthetic construct
  source 1..20: mol_type = other RNA
agtatgtcttactttgttgc

SEQ ID NO: 2542 - RNA, 20 nt, synthetic construct
  source 1..20: mol_type = other RNA
tctcacctctgcaagtattg

SEQ ID NO: 2543 - RNA, 20 nt, synthetic construct
  source 1..20: mol_type = other RNA
ctctcacctctgcaagtatt

SEQ ID NO: 2544 - RNA, 20 nt, synthetic construct
  source 1..20: mol_type = other RNA
tctctcacctctgcaagtat

SEQ ID NO: 2545 - RNA, 20 nt, synthetic construct
  source 1..20: mol_type = other RNA
acccaggggaacaacagaag

SEQ ID NO: 2546 - RNA, 20 nt, synthetic construct
  source 1..20: mol_type = other RNA
cacccacaggtggcaagtta

SEQ ID NO: 2547 - RNA, 20 nt, synthetic construct
  source 1..20: mol_type = other RNA
acagaccacaagttgaagtc

SEQ ID NO: 2548 - RNA, 20 nt, synthetic construct
  source 1..20: mol_type = other RNA
ttctgcaggattgcacaaca

SEQ ID NO: 2549 - RNA, 20 nt, synthetic construct
  source 1..20: mol_type = other RNA
tctgcaggattgcacaacat

SEQ ID NO: 2550 - RNA, 20 nt, synthetic construct
  source 1..20: mol_type = other RNA
gcaggattgcacaacatggg

SEQ ID NO: 2551 - RNA, 20 nt, synthetic construct
  source 1..20: mol_type = other RNA
ccctcagatgtctatgtgtt

SEQ ID NO: 2552 - RNA, 20 nt, synthetic construct
  source 1..20: mol_type = other RNA
cctcagatgtctatgtgttt

SEQ ID NO: 2553 - RNA, 20 nt, synthetic construct
  source 1..20: mol_type = other RNA
ctcagatgtctatgtgtttg

SEQ ID NO: 2554 - RNA, 20 nt, synthetic construct
  source 1..20: mol_type = other RNA
gtgtccccagcgcccttcaa

SEQ ID NO: 2555 - RNA, 20 nt, synthetic construct
  source 1..20: mol_type = other RNA
tgtccccagcgcccttcaaa

SEQ ID NO: 2556 - RNA, 20 nt, synthetic construct
  source 1..20: mol_type = other RNA
ctacttcaggaggggagaag

SEQ ID NO: 2557 - RNA, 20 nt, synthetic construct
  source 1..20: mol_type = other RNA
tacttcaggaggggagaagc

SEQ ID NO: 2558 - RNA, 20 nt, synthetic construct
  source 1..20: mol_type = other RNA
cctctccttgcaggtgattc

SEQ ID NO: 2559 - RNA, 20 nt, synthetic construct
  source 1..20: mol_type = other RNA
ctccttgcaggtgattctgg

SEQ ID NO: 2560 - RNA, 20 nt, synthetic construct
  source 1..20: mol_type = other RNA
tgcaggttggtgtaatcagc

SEQ ID NO: 2561 - RNA, 20 nt, synthetic construct
  source 1..20: mol_type = other RNA
gcaggttggtgtaatcagct

SEQ ID NO: 2562 - RNA, 20 nt, synthetic construct
  source 1..20: mol_type = other RNA
ctctcacctctgcaagtatt

SEQ ID NO: 2563 - RNA, 20 nt, synthetic construct
  source 1..20: mol_type = other RNA
tctctcacctctgcaagtat

SEQ ID NO: 2564 - RNA, 20 nt, synthetic construct
  source 1..20: mol_type = other RNA
acccaggggaacaacagaag

SEQ ID NO: 2565 - RNA, 20 nt, synthetic construct
  source 1..20: mol_type = other RNA
ttctgcaggattgcacaaca

SEQ ID NO: 2566 - RNA, 21 nt, synthetic construct
  source 1..21: mol_type = other RNA
tcccttctgaccatcagtcat

SEQ ID NO: 2567 - RNA, 21 nt, synthetic construct
  source 1..21: mol_type = other RNA
actcacccagataatcctccc

SEQ ID NO: 2568 - RNA, 21 nt, synthetic construct
  source 1..21: mol_type = other RNA
ccttacctacgctgaccttga

SEQ ID NO: 2569 - RNA, 21 nt, synthetic construct
  source 1..21: mol_type = other RNA
gtttctcaccttatccccatt

SEQ ID NO: 2570 - RNA, 21 nt, synthetic construct
  source 1..21: mol_type = other RNA
ttctctcacctctgcaagtat

SEQ ID NO: 2571 - RNA, 21 nt, synthetic construct
  source 1..21: mol_type = other RNA
cctcacccacaggtggcaagt

SEQ ID NO: 2572 - RNA, 21 nt, synthetic construct
  source 1..21: mol_type = other RNA
tccctcagatgtctatgtgtt

SEQ ID NO: 2573 - RNA, 21 nt, synthetic construct
  source 1..21: mol_type = other RNA
ctccttctctgccagatgaaa

SEQ ID NO: 2574 - RNA, 21 nt, synthetic construct
  source 1..21: mol_type = other RNA
ctgccagatgaaagccagtct

SEQ ID NO: 2575 - RNA, 22 nt, synthetic construct
  source 1..22: mol_type = other RNA
ccctcaaacctctgcactctgc

SEQ ID NO: 2576 - RNA, 22 nt, synthetic construct
  source 1..22: mol_type = other RNA
tgtgcttacaatgactgagatc

SEQ ID NO: 2577 - RNA, 22 nt, synthetic construct
  source 1..22: mol_type = other RNA
catccttacctacgctgacctt

SEQ ID NO: 2578 - RNA, 22 nt, synthetic construct
  source 1..22: mol_type = other RNA
tctcacctctgcaagtattggg

SEQ ID NO: 2579 - RNA, 22 nt, synthetic construct
  source 1..22: mol_type = other RNA
ctcttcaggtgtgaccaccact

SEQ ID NO: 2580 - RNA, 22 nt, synthetic construct
  source 1..22: mol_type = other RNA
tcaaagcaatccactgtccaag

SEQ ID NO: 2581 - RNA, 22 nt, synthetic construct
  source 1..22: mol_type = other RNA
tctgccagatgaaagccagtct

SEQ ID NO: 2582 - RNA, 22 nt, synthetic construct
  source 1..22: mol_type = other RNA
tgtccccagcgcccttcaaagg

SEQ ID NO: 2583 - RNA, 22 nt, synthetic construct
  source 1..22: mol_type = other RNA
tcctttataggcccatttgtct

SEQ ID NO: 2584 - RNA, 22 nt, synthetic construct
  source 1..22: mol_type = other RNA
gtccagaggaagagctgctccc

SEQ ID NO: 2585 - RNA, 21 nt, synthetic construct
  source 1..21: mol_type = other RNA
tcccttctgaccatcagtcat

SEQ ID NO: 2586 - RNA, 21 nt, synthetic construct
  source 1..21: mol_type = other RNA
actcacccagataatcctccc

SEQ ID NO: 2587 - RNA, 21 nt, synthetic construct
  source 1..21: mol_type = other RNA
ccttacctacgctgaccttga

SEQ ID NO: 2588 - RNA, 21 nt, synthetic construct
  source 1..21: mol_type = other RNA
ttctctcacctctgcaagtat

SEQ ID NO: 2589 - RNA, 21 nt, synthetic construct
  source 1..21: mol_type = other RNA
atgcttctcacctccgttgtc

SEQ ID NO: 2590 - RNA, 21 nt, synthetic construct
  source 1..21: mol_type = other RNA
tgttgttcccctgggtgccag

SEQ ID NO: 2591 - RNA, 21 nt, synthetic construct
  source 1..21: mol_type = other RNA
cttctgaccatcagtcatgag

SEQ ID NO: 2592 - RNA, 21 nt, synthetic construct
  source 1..21: mol_type = other RNA
tcccttctgaccatcagtcat

SEQ ID NO: 2593 - RNA, 21 nt, synthetic construct
  source 1..21: mol_type = other RNA
actcacccagataatcctccc

SEQ ID NO: 2594 - RNA, 21 nt, synthetic construct
  source 1..21: mol_type = other RNA
gacatctgagggataaaaagg

SEQ ID NO: 2595 - RNA, 21 nt, synthetic construct
  source 1..21: mol_type = other RNA
ggctttcatctggcagagaag

SEQ ID NO: 2596 - RNA, 21 nt, synthetic construct
  source 1..21: mol_type = other RNA
ccttacctacgctgaccttga

SEQ ID NO: 2597 - RNA, 21 nt, synthetic construct
  source 1..21: mol_type = other RNA
tgcatccttacctacgctgac

SEQ ID NO: 2598 - RNA, 21 nt, synthetic construct
  source 1..21: mol_type = other RNA
tgtcttactttgttgctggca

SEQ ID NO: 2599 - RNA, 21 nt, synthetic construct
  source 1..21: mol_type = other RNA
gtatgtcttactttgttgctg

SEQ ID NO: 2600 - RNA, 21 nt, synthetic construct
  source 1..21: mol_type = other RNA
gtttctcaccttatccccatt

SEQ ID NO: 2601 - RNA, 21 nt, synthetic construct
  source 1..21: mol_type = other RNA
ttctctcacctctgcaagtat

SEQ ID NO: 2602 - RNA, 21 nt, synthetic construct
  source 1..21: mol_type = other RNA
tacaccaacctgcagaggcag

SEQ ID NO: 2603 - RNA, 20 nt, synthetic construct
  source 1..20: mol_type = other RNA
cacctgaagagaaaggctga

SEQ ID NO: 2604 - RNA, 20 nt, synthetic construct
  source 1..20: mol_type = other RNA
tggattgctttgagaagggg

SEQ ID NO: 2605 - RNA, 20 nt, synthetic construct
  source 1..20: mol_type = other RNA
taccccgctgcagaggtatg

SEQ ID NO: 2606 - RNA, 20 nt, synthetic construct
  source 1..20: mol_type = other RNA
gagtctgggagagtcagaaa

SEQ ID NO: 2607 - RNA, 20 nt, synthetic construct
  source 1..20: mol_type = other RNA
tgggcctataaaggacaagg

SEQ ID NO: 2608 - RNA, 20 nt, synthetic construct
  source 1..20: mol_type = other RNA
aatgggcctataaaggacaa

SEQ ID NO: 2609 - RNA, 20 nt, synthetic construct
  source 1..20: mol_type = other RNA
gcctttctgtaggggaggtg

SEQ ID NO: 2610 - RNA, 20 nt, synthetic construct
  source 1..20: mol_type = other RNA
gtggattgctttgagaaggg

SEQ ID NO: 2611 - RNA, 20 nt, synthetic construct
  source 1..20: mol_type = other RNA
tgcaatcctgcagaagagac

SEQ ID NO: 2612 - RNA, 20 nt, synthetic construct
  source 1..20: mol_type = other RNA
catctgagggataaaaagga

SEQ ID NO: 2613 - RNA, 20 nt, synthetic construct
  source 1..20: mol_type = other RNA
tagacatctgagggataaaa

SEQ ID NO: 2614 - RNA, 20 nt, synthetic construct
  source 1..20: mol_type = other RNA
ccctcctgaagtaggagagt

SEQ ID NO: 2615 - RNA, 20 nt, synthetic construct
  source 1..20: mol_type = other RNA
aaatgggcctataaaggaca

SEQ ID NO: 2616 - RNA, 20 nt, synthetic construct
  source 1..20: mol_type = other RNA
tgcctttctgtaggggaggt

SEQ ID NO: 2617 - RNA, 20 nt, synthetic construct
  source 1..20: mol_type = other RNA
accaacctgcagaggcagtg

SEQ ID NO: 2618 - RNA, 20 nt, synthetic construct
  source 1..20: mol_type = other RNA
cttctcacctccgttgtcac

SEQ ID NO: 2619 - RNA, 20 nt, synthetic construct
  source 1..20: mol_type = other RNA
cttctcacctccgttgtcac

SEQ ID NO: 2620 - RNA, 20 nt, synthetic construct
  source 1..20: mol_type = other RNA
ctgaccatcagtcatgagga

SEQ ID NO: 2621 - RNA, 20 nt, synthetic construct
  source 1..20: mol_type = other RNA
ctgaccatcagtcatgagga

SEQ ID NO: 2622 - RNA, 20 nt, synthetic construct
  source 1..20: mol_type = other RNA
ctccctaccgatcatttggt

SEQ ID NO: 2623 - RNA, 20 nt, synthetic construct
  source 1..20: mol_type = other RNA
ctccctaccgatcatttggt

SEQ ID NO: 2624 - RNA, 20 nt, synthetic construct
  source 1..20: mol_type = other RNA
ttacctacgctgaccttgat

SEQ ID NO: 2625 - RNA, 20 nt, synthetic construct
  source 1..20: mol_type = other RNA
ttacctacgctgaccttgat

SEQ ID NO: 2626 - RNA, 20 nt, synthetic construct
  source 1..20: mol_type = other RNA
atccttacctacgctgacct

SEQ ID NO: 2627 - RNA, 20 nt, synthetic construct
  source 1..20: mol_type = other RNA
atccttacctacgctgacct

SEQ ID NO: 2628 - RNA, 20 nt, synthetic construct
  source 1..20: mol_type = other RNA
tctcaccttatccccattct

SEQ ID NO: 2629 - RNA, 20 nt, synthetic construct
  source 1..20: mol_type = other RNA
tctcaccttatccccattct

SEQ ID NO: 2630 - RNA, 20 nt, synthetic construct
  source 1..20: mol_type = other RNA
gaggactcacttgaatgaaa

SEQ ID NO: 2631 - RNA, 20 nt, synthetic construct
  source 1..20: mol_type = other RNA
gaggactcacttgaatgaaa

SEQ ID NO: 2632 - RNA, 20 nt, synthetic construct
  source 1..20: mol_type = other RNA
tcaaagcaatccactgtcca

SEQ ID NO: 2633 - RNA, 20 nt, synthetic construct
  source 1..20: mol_type = other RNA
tcaaagcaatccactgtcca

SEQ ID NO: 2634 - RNA, 20 nt, synthetic construct
  source 1..20: mol_type = other RNA
ctcccagactccttcatgta

SEQ ID NO: 2635 - RNA, 20 nt, synthetic construct
  source 1..20: mol_type = other RNA
ctcccagactccttcatgta

SEQ ID NO: 2636 - RNA, 20 nt, synthetic construct
  source 1..20: mol_type = other RNA
cccaggggaacaacagaagc

SEQ ID NO: 2637 - RNA, 20 nt, synthetic construct
  source 1..20: mol_type = other RNA
cccaggggaacaacagaagc

SEQ ID NO: 2638 - RNA, 20 nt, synthetic construct
  source 1..20: mol_type = other RNA
acaggtggcaagttatggtg

SEQ ID NO: 2639 - RNA, 20 nt, synthetic construct
  source 1..20: mol_type = other RNA
acaggtggcaagttatggtg

SEQ ID NO: 2640 - RNA, 20 nt, synthetic construct
  source 1..20: mol_type = other RNA
gccagatgaaagccagtctc

SEQ ID NO: 2641 - RNA, 20 nt, synthetic construct
  source 1..20: mol_type = other RNA
gccagatgaaagccagtctc

SEQ ID NO: 2642 - RNA, 20 nt, synthetic construct
  source 1..20: mol_type = other RNA
gtccccagcgcccttcaaag

SEQ ID NO: 2643 - RNA, 20 nt, synthetic construct
  source 1..20: mol_type = other RNA
gtccccagcgcccttcaaag

SEQ ID NO: 2644 - RNA, 20 nt, synthetic construct
  source 1..20: mol_type = other RNA
tacagaaaggcagctgtgag

SEQ ID NO: 2645 - RNA, 20 nt, synthetic construct
  source 1..20: mol_type = other RNA
tacagaaaggcagctgtgag

SEQ ID NO: 2646 - RNA, 20 nt, synthetic construct
  source 1..20: mol_type = other RNA
tcgcttacctccagacaaga

SEQ ID NO: 2647 - RNA, 20 nt, synthetic construct
  source 1..20: mol_type = other RNA
tcgcttacctccagacaaga

SEQ ID NO: 2648 - RNA, 20 nt, synthetic construct
  source 1..20: mol_type = other RNA
tcacctccgttgtcacagat

SEQ ID NO: 2649 - RNA, 20 nt, synthetic construct
  source 1..20: mol_type = other RNA
tcacctccgttgtcacagat

SEQ ID NO: 2650 - RNA, 20 nt, synthetic construct
  source 1..20: mol_type = other RNA
cttacaatgactgagatctt

SEQ ID NO: 2651 - RNA, 20 nt, synthetic construct
  source 1..20: mol_type = other RNA
cttacaatgactgagatctt

SEQ ID NO: 2652 - RNA, 20 nt, synthetic construct
  source 1..20: mol_type = other RNA
acgctctcacctgatagtct

SEQ ID NO: 2653 - RNA, 20 nt, synthetic construct
  source 1..20: mol_type = other RNA
acgctctcacctgatagtct

SEQ ID NO: 2654 - RNA, 20 nt, synthetic construct
  source 1..20: mol_type = other RNA
ctgcaggattgcacaacatg

SEQ ID NO: 2655 - RNA, 20 nt, synthetic construct
  source 1..20: mol_type = other RNA
ctgcaggattgcacaacatg

SEQ ID NO: 2656 - RNA, 20 nt, synthetic construct
  source 1..20: mol_type = other RNA
ataggcccatttgtctcccc

SEQ ID NO: 2657 - RNA, 20 nt, synthetic construct
  source 1..20: mol_type = other RNA
ataggcccatttgtctcccc

SEQ ID NO: 2658 - RNA, 20 nt, synthetic construct
  source 1..20: mol_type = other RNA
ctctgcaggttggtgtaatc

SEQ ID NO: 2659 - RNA, 20 nt, synthetic construct
  source 1..20: mol_type = other RNA
ctctgcaggttggtgtaatc

SEQ ID NO: 2660 - RNA, 20 nt, synthetic construct
  source 1..20: mol_type = other RNA
ctcgcttacctccagacaag

SEQ ID NO: 2661 - RNA, 20 nt, synthetic construct
  source 1..20: mol_type = other RNA
ctcgcttacctccagacaag

SEQ ID NO: 2662 - RNA, 20 nt, synthetic construct
  source 1..20: mol_type = other RNA
caaaggtcaccttggcagga

SEQ ID NO: 2663 - RNA, 20 nt, synthetic construct
  source 1..20: mol_type = other RNA
caaaggtcaccttggcagga

SEQ ID NO: 2664 - RNA, 20 nt, synthetic construct
  source 1..20: mol_type = other RNA
ccttctgaccatcagtcatg

SEQ ID NO: 2665 - RNA, 20 nt, synthetic construct
  source 1..20: mol_type = other RNA
ccttctgaccatcagtcatg

SEQ ID NO: 2666 - RNA, 20 nt, synthetic construct
  source 1..20: mol_type = other RNA
tcacccagataatcctccct

SEQ ID NO: 2667 - RNA, 20 nt, synthetic construct
  source 1..20: mol_type = other RNA
tcacccagataatcctccct

SEQ ID NO: 2668 - RNA, 20 nt, synthetic construct
  source 1..20: mol_type = other RNA
gcttacaatgactgagatct

SEQ ID NO: 2669 - RNA, 20 nt, synthetic construct
  source 1..20: mol_type = other RNA
gcttacaatgactgagatct

SEQ ID NO: 2670 - RNA, 20 nt, synthetic construct
  source 1..20: mol_type = other RNA
cttactttgttgctggcaag

SEQ ID NO: 2671 - RNA, 20 nt, synthetic construct
  source 1..20: mol_type = other RNA
cttactttgttgctggcaag

SEQ ID NO: 2672 - RNA, 20 nt, synthetic construct
  source 1..20: mol_type = other RNA
tctcacctctgcaagtattg

SEQ ID NO: 2673 - RNA, 20 nt, synthetic construct
  source 1..20: mol_type = other RNA
tctcacctctgcaagtattg

SEQ ID NO: 2674 - RNA, 20 nt, synthetic construct
  source 1..20: mol_type = other RNA
cacccacaggtggcaagtta

SEQ ID NO: 2675 - RNA, 20 nt, synthetic construct
  source 1..20: mol_type = other RNA
cacccacaggtggcaagtta

SEQ ID NO: 2676 - RNA, 20 nt, synthetic construct
  source 1..20: mol_type = other RNA
acagaccacaagttgaagtc

SEQ ID NO: 2677 - RNA, 20 nt, synthetic construct
  source 1..20: mol_type = other RNA
acagaccacaagttgaagtc

SEQ ID NO: 2678 - RNA, 20 nt, synthetic construct
  source 1..20: mol_type = other RNA
tctgcaggattgcacaacat

SEQ ID NO: 2679 - RNA, 20 nt, synthetic construct
  source 1..20: mol_type = other RNA
tctgcaggattgcacaacat

SEQ ID NO: 2680 - RNA, 20 nt, synthetic construct
  source 1..20: mol_type = other RNA
gcaggattgcacaacatggg

SEQ ID NO: 2681 - RNA, 20 nt, synthetic construct
  source 1..20: mol_type = other RNA
gcaggattgcacaacatggg

SEQ ID NO: 2682 - RNA, 20 nt, synthetic construct
  source 1..20: mol_type = other RNA
ccctcagatgtctatgtgtt

SEQ ID NO: 2683 - RNA, 20 nt, synthetic construct
  source 1..20: mol_type = other RNA
ccctcagatgtctatgtgtt

SEQ ID NO: 2684 - RNA, 20 nt, synthetic construct
  source 1..20: mol_type = other RNA
cctcagatgtctatgtgttt

SEQ ID NO: 2685 - RNA, 20 nt, synthetic construct
  source 1..20: mol_type = other RNA
cctcagatgtctatgtgttt

SEQ ID NO: 2686 - RNA, 20 nt, synthetic construct
  source 1..20: mol_type = other RNA
ctcagatgtctatgtgtttg

SEQ ID NO: 2687 - RNA, 20 nt, synthetic construct
  source 1..20: mol_type = other RNA
ctcagatgtctatgtgtttg

SEQ ID NO: 2688 - RNA, 20 nt, synthetic construct
  source 1..20: mol_type = other RNA
gtgtccccagcgcccttcaa

SEQ ID NO: 2689 - RNA, 20 nt, synthetic construct
  source 1..20: mol_type = other RNA
gtgtccccagcgcccttcaa

SEQ ID NO: 2690 - RNA, 20 nt, synthetic construct
  source 1..20: mol_type = other RNA
tgtccccagcgcccttcaaa

SEQ ID NO: 2691 - RNA, 20 nt, synthetic construct
  source 1..20: mol_type = other RNA
tgtccccagcgcccttcaaa

SEQ ID NO: 2692 - RNA, 20 nt, synthetic construct
  source 1..20: mol_type = other RNA
ctacttcaggaggggagaag

SEQ ID NO: 2693 - RNA, 20 nt, synthetic construct
  source 1..20: mol_type = other RNA
ctacttcaggaggggagaag

SEQ ID NO: 2694 - RNA, 20 nt, synthetic construct
  source 1..20: mol_type = other RNA
tacttcaggaggggagaagc

SEQ ID NO: 2695 - RNA, 20 nt, synthetic construct
  source 1..20: mol_type = other RNA
tacttcaggaggggagaagc

SEQ ID NO: 2696 - RNA, 20 nt, synthetic construct
  source 1..20: mol_type = other RNA
ctccttgcaggtgattctgg

SEQ ID NO: 2697 - RNA, 20 nt, synthetic construct
  source 1..20: mol_type = other RNA
ctccttgcaggtgattctgg

SEQ ID NO: 2698 - RNA, 20 nt, synthetic construct
  source 1..20: mol_type = other RNA
tgcaggttggtgtaatcagc

SEQ ID NO: 2699 - RNA, 20 nt, synthetic construct
  source 1..20: mol_type = other RNA
tgcaggttggtgtaatcagc

SEQ ID NO: 2700 - RNA, 20 nt, synthetic construct
  source 1..20: mol_type = other RNA
gcaggttggtgtaatcagct

SEQ ID NO: 2701 - RNA, 20 nt, synthetic construct
  source 1..20: mol_type = other RNA
gcaggttggtgtaatcagct

SEQ ID NO: 2702 - RNA, 21 nt, synthetic construct
  source 1..21: mol_type = other RNA
tcccttctgaccatcagtcat

SEQ ID NO: 2703 - RNA, 21 nt, synthetic construct
  source 1..21: mol_type = other RNA
tcccttctgaccatcagtcat

SEQ ID NO: 2704 - RNA, 21 nt, synthetic construct
  source 1..21: mol_type = other RNA
actcacccagataatcctccc

SEQ ID NO: 2705 - RNA, 21 nt, synthetic construct
  source 1..21: mol_type = other RNA
actcacccagataatcctccc

SEQ ID NO: 2706 - RNA, 21 nt, synthetic construct
  source 1..21: mol_type = other RNA
ccttacctacgctgaccttga

SEQ ID NO: 2707 - RNA, 21 nt, synthetic construct
  source 1..21: mol_type = other RNA
ccttacctacgctgaccttga

SEQ ID NO: 2708 - RNA, 21 nt, synthetic construct
  source 1..21: mol_type = other RNA
ttctctcacctctgcaagtat

SEQ ID NO: 2709 - RNA, 21 nt, synthetic construct
  source 1..21: mol_type = other RNA
ttctctcacctctgcaagtat

SEQ ID NO: 2710 - RNA, 21 nt, synthetic construct
  source 1..21: mol_type = other RNA
tccctcagatgtctatgtgtt

SEQ ID NO: 2711 - RNA, 21 nt, synthetic construct
  source 1..21: mol_type = other RNA
tccctcagatgtctatgtgtt

SEQ ID NO: 2712 - RNA, 21 nt, synthetic construct
  source 1..21: mol_type = other RNA
ctgccagatgaaagccagtct

SEQ ID NO: 2713 - RNA, 21 nt, synthetic construct
  source 1..21: mol_type = other RNA
ctgccagatgaaagccagtct

SEQ ID NO: 2714 - RNA, 21 nt, synthetic construct
  source 1..21: mol_type = other RNA
atgcttctcacctccgttgtc

SEQ ID NO: 2715 - RNA, 21 nt, synthetic construct
  source 1..21: mol_type = other RNA
atgcttctcacctccgttgtc

SEQ ID NO: 2716 - RNA, 21 nt, synthetic construct
  source 1..21: mol_type = other RNA
aggaggattccaccttctcaa

SEQ ID NO: 2717 - RNA, 21 nt, synthetic construct
  source 1..21: mol_type = other RNA
aggaggattccaccttctcaa

SEQ ID NO: 2718 - RNA, 21 nt, synthetic construct
  source 1..21: mol_type = other RNA
ccctaacctctgaccttcata

SEQ ID NO: 2719 - RNA, 21 nt, synthetic construct
  source 1..21: mol_type = other RNA
ccctaacctctgaccttcata

SEQ ID NO: 2720 - RNA, 21 nt, synthetic construct
  source 1..21: mol_type = other RNA
cttctgaccatcagtcatgag

SEQ ID NO: 2721 - RNA, 21 nt, synthetic construct
  source 1..21: mol_type = other RNA
cttctgaccatcagtcatgag

SEQ ID NO: 2722 - RNA, 21 nt, synthetic construct
  source 1..21: mol_type = other RNA
cttgtatctccctaccgatca

SEQ ID NO: 2723 - RNA, 21 nt, synthetic construct
  source 1..21: mol_type = other RNA
cttgtatctccctaccgatca

SEQ ID NO: 2724 - RNA, 21 nt, synthetic construct
  source 1..21: mol_type = other RNA
ggattctgtgcttacaatgac

SEQ ID NO: 2725 - RNA, 21 nt, synthetic construct
  source 1..21: mol_type = other RNA
ggattctgtgcttacaatgac

SEQ ID NO: 2726 - RNA, 21 nt, synthetic construct
  source 1..21: mol_type = other RNA
tgcatccttacctacgctgac

SEQ ID NO: 2727 - RNA, 21 nt, synthetic construct
  source 1..21: mol_type = other RNA
tgcatccttacctacgctgac

SEQ ID NO: 2728 - RNA, 21 nt, synthetic construct
  source 1..21: mol_type = other RNA
tgtcttactttgttgctggca

SEQ ID NO: 2729 - RNA, 21 nt, synthetic construct
  source 1..21: mol_type = other RNA
tgtcttactttgttgctggca

SEQ ID NO: 2730 - RNA, 21 nt, synthetic construct
  source 1..21: mol_type = other RNA
gtatgtcttactttgttgctg

SEQ ID NO: 2731 - RNA, 21 nt, synthetic construct
  source 1..21: mol_type = other RNA
gtatgtcttactttgttgctg

SEQ ID NO: 2732 - RNA, 21 nt, synthetic construct
  source 1..21: mol_type = other RNA
cttcaggtgtgaccaccactc

SEQ ID NO: 2733 - RNA, 21 nt, synthetic construct
  source 1..21: mol_type = other RNA
cttcaggtgtgaccaccactc

SEQ ID NO: 2734 - RNA, 21 nt, synthetic construct
  source 1..21: mol_type = other RNA
ccctctccacagaccacaagt

SEQ ID NO: 2735 - RNA, 21 nt, synthetic construct
  source 1..21: mol_type = other RNA
ccctctccacagaccacaagt

SEQ ID NO: 2736 - RNA, 21 nt, synthetic construct
  source 1..21: mol_type = other RNA
ctacagaaaggcagctgtgag

SEQ ID NO: 2737 - RNA, 21 nt, synthetic construct
  source 1..21: mol_type = other RNA
ctacagaaaggcagctgtgag

SEQ ID NO: 2738 - RNA, 21 nt, synthetic construct
  source 1..21: mol_type = other RNA
tgttgttcccctgggtgccag

SEQ ID NO: 2739 - RNA, 21 nt, synthetic construct
  source 1..21: mol_type = other RNA
tgttgttcccctgggtgccag

SEQ ID NO: 2740 - RNA, 21 nt, synthetic construct
  source 1..21: mol_type = other RNA
gacatctgagggataaaaagg

SEQ ID NO: 2741 - RNA, 21 nt, synthetic construct
  source 1..21: mol_type = other RNA
gacatctgagggataaaaagg

SEQ ID NO: 2742 - RNA, 21 nt, synthetic construct
  source 1..21: mol_type = other RNA
ggctttcatctggcagagaag

SEQ ID NO: 2743 - RNA, 21 nt, synthetic construct
  source 1..21: mol_type = other RNA
ggctttcatctggcagagaag

SEQ ID NO: 2744 - RNA, 21 nt, synthetic construct
  source 1..21: mol_type = other RNA
tacaccaacctgcagaggcag

SEQ ID NO: 2745 - RNA, 21 nt, synthetic construct
  source 1..21: mol_type = other RNA
tacaccaacctgcagaggcag

SEQ ID NO: 2746 - RNA, 21 nt, synthetic construct
  source 1..21: mol_type = other RNA
cttacctccagacaagaggcc

SEQ ID NO: 2747 - RNA, 21 nt, synthetic construct
  source 1..21: mol_type = other RNA
cttacctccagacaagaggcc

SEQ ID NO: 2748 - RNA, 21 nt, synthetic construct
  source 1..21: mol_type = other RNA
tggtcacacctgaagagaaag

SEQ ID NO: 2749 - RNA, 21 nt, synthetic construct
  source 1..21: mol_type = other RNA
tggtcacacctgaagagaaag

SEQ ID NO: 2750 - RNA, 21 nt, synthetic construct
  source 1..21: mol_type = other RNA
ggattgctttgagaagggggg

SEQ ID NO: 2751 - RNA, 21 nt, synthetic construct
  source 1..21: mol_type = other RNA
ggattgctttgagaagggggg

SEQ ID NO: 2752 - RNA, 21 nt, synthetic construct
  source 1..21: mol_type = other RNA
cgctgcagaggtatgagacat

SEQ ID NO: 2753 - RNA, 21 nt, synthetic construct
  source 1..21: mol_type = other RNA
cgctgcagaggtatgagacat

SEQ ID NO: 2754 - RNA, 21 nt, synthetic construct
  source 1..21: mol_type = other RNA
ggagtctgggagagtcagaaa

SEQ ID NO: 2755 - RNA, 21 nt, synthetic construct
  source 1..21: mol_type = other RNA
ggagtctgggagagtcagaaa

SEQ ID NO: 2756 - RNA, 21 nt, synthetic construct
  source 1..21: mol_type = other RNA
atgaaggagtctgggagagtc

SEQ ID NO: 2757 - RNA, 21 nt, synthetic construct
  source 1..21: mol_type = other RNA
atgaaggagtctgggagagtc

SEQ ID NO: 2758 - RNA, 21 nt, synthetic construct
  source 1..21: mol_type = other RNA
tttgaagggcgctggggacac

SEQ ID NO: 2759 - RNA, 21 nt, synthetic construct
  source 1..21: mol_type = other RNA
tttgaagggcgctggggacac

SEQ ID NO: 2760 - RNA, 21 nt, synthetic construct
  source 1..21: mol_type = other RNA
ctcccctcctgaagtaggaga

SEQ ID NO: 2761 - RNA, 21 nt, synthetic construct
  source 1..21: mol_type = other RNA
ctcccctcctgaagtaggaga

SEQ ID NO: 2762 - RNA, 21 nt, synthetic construct
  source 1..21: mol_type = other RNA
cttactttgttgctggcaagt

SEQ ID NO: 2763 - RNA, 21 nt, synthetic construct
  source 1..21: mol_type = other RNA
cttactttgttgctggcaagt

SEQ ID NO: 2764 - RNA, 20 nt, synthetic construct
  source 1..20: mol_type = other RNA
actccatcggccattcactt

SEQ ID NO: 2765 - RNA, 20 nt, synthetic construct
  source 1..20: mol_type = other RNA
acccaaattttggggtatgt

SEQ ID NO: 2766 - RNA, 20 nt, synthetic construct
  source 1..20: mol_type = other RNA
cgtgacccagtctgcattac

SEQ ID NO: 2767 - RNA, 20 nt, synthetic construct
  source 1..20: mol_type = other RNA
gaccaaaagactgtcaggaa

SEQ ID NO: 2768 - RNA, 20 nt, synthetic construct
  source 1..20: mol_type = other RNA
ggccgatggagtgggcagac

SEQ ID NO: 2769 - RNA, 20 nt, synthetic construct
  source 1..20: mol_type = other RNA
acccctcaagaggtggccga

SEQ ID NO: 2770 - RNA, 20 nt, synthetic construct
  source 1..20: mol_type = other RNA
aggccctccaggcagtgtac

SEQ ID NO: 2771 - RNA, 20 nt, synthetic construct
  source 1..20: mol_type = other RNA
tggccagactatcaggtgag

SEQ ID NO: 2772 - RNA, 20 nt, synthetic construct
  source 1..20: mol_type = other RNA
caacaaagtaagacatactt

SEQ ID NO: 2773 - RNA, 20 nt, synthetic construct
  source 1..20: mol_type = other RNA
caaaagcaggtacctgctca

SEQ ID NO: 2774 - RNA, 20 nt, synthetic construct
  source 1..20: mol_type = other RNA
cctctttcaagtgctgccct

SEQ ID NO: 2775 - RNA, 21 nt, synthetic construct
  source 1..21: mol_type = other RNA
gagaaactccaagatgaggat

SEQ ID NO: 2776 - RNA, 21 nt, synthetic construct
  source 1..21: mol_type = other RNA
ctgccatggttgcttgtggta

SEQ ID NO: 2777 - RNA, 21 nt, synthetic construct
  source 1..21: mol_type = other RNA
ttctccaagagggccaggcac

SEQ ID NO: 2778 - RNA, 21 nt, synthetic construct
  source 1..21: mol_type = other RNA
accctgtgcagacacgtacct

SEQ ID NO: 2779 - RNA, 21 nt, synthetic construct
  source 1..21: mol_type = other RNA
accaaaagactgtcaggaagg

SEQ ID NO: 2780 - RNA, 21 nt, synthetic construct
  source 1..21: mol_type = other RNA
acctgccaagtgaatggccga

SEQ ID NO: 2781 - RNA, 21 nt, synthetic construct
  source 1..21: mol_type = other RNA
agacaatgagcaacatgtgtt

SEQ ID NO: 2782 - RNA, 21 nt, synthetic construct
  source 1..21: mol_type = other RNA
gagcaacatgtgttcaaagtc

SEQ ID NO: 2783 - RNA, 21 nt, synthetic construct
  source 1..21: mol_type = other RNA
ccacaagcaaccatggcaggc

SEQ ID NO: 2784 - RNA, 21 nt, synthetic construct
  source 1..21: mol_type = other RNA
caaaaaccagaagcggcaaaa

SEQ ID NO: 2785 - RNA, 21 nt, synthetic construct
  source 1..21: mol_type = other RNA
gagaaactccaagatgaggat

SEQ ID NO: 2786 - RNA, 20 nt, synthetic construct
  source 1..20: mol_type = other RNA
agggtgctccaggaccccgt

SEQ ID NO: 2787 - RNA, 20 nt, synthetic construct
  source 1..20: mol_type = other RNA
gggccagtattccccgttct

SEQ ID NO: 2788 - RNA, 20 nt, synthetic construct
  source 1..20: mol_type = other RNA
cgctccaagagccaccttcc

SEQ ID NO: 2789 - RNA, 20 nt, synthetic construct
  source 1..20: mol_type = other RNA
gcggttccagccttcaggag

SEQ ID NO: 2790 - RNA, 20 nt, synthetic construct
  source 1..20: mol_type = other RNA
gttcccaaaccatgccacag

SEQ ID NO: 2791 - RNA, 20 nt, synthetic construct
  source 1..20: mol_type = other RNA
gtgttcccaaaccatgccac

SEQ ID NO: 2792 - RNA, 20 nt, synthetic construct
  source 1..20: mol_type = other RNA
cagccagggcagcacttgaa

SEQ ID NO: 2793 - RNA, 20 nt, synthetic construct
  source 1..20: mol_type = other RNA
ccttcagccagggcagcact

SEQ ID NO: 2794 - RNA, 20 nt, synthetic construct
  source 1..20: mol_type = other RNA
ccccagggatcctgctctct

SEQ ID NO: 2795 - RNA, 20 nt, synthetic construct
  source 1..20: mol_type = other RNA
tcaagaccaaaagactgtca

SEQ ID NO: 2796 - RNA, 20 nt, synthetic construct
  source 1..20: mol_type = other RNA
gcacctgccaagtgaatggc

SEQ ID NO: 2797 - RNA, 20 nt, synthetic construct
  source 1..20: mol_type = other RNA
ctgccaagtgaatggccgat

SEQ ID NO: 2798 - RNA, 20 nt, synthetic construct
  source 1..20: mol_type = other RNA
gaatggccgatggagtgggc

SEQ ID NO: 2799 - RNA, 20 nt, synthetic construct
  source 1..20: mol_type = other RNA
agtgggcagacagcgatctg

SEQ ID NO: 2800 - RNA, 20 nt, synthetic construct
  source 1..20: mol_type = other RNA
ggcagccagtaccgccttga

SEQ ID NO: 2801 - RNA, 20 nt, synthetic construct
  source 1..20: mol_type = other RNA
tcccagcggcgaacgtgtca

SEQ ID NO: 2802 - RNA, 20 nt, synthetic construct
  source 1..20: mol_type = other RNA
gtgtcaggaaggtggctctt

SEQ ID NO: 2803 - RNA, 20 nt, synthetic construct
  source 1..20: mol_type = other RNA
aggggaacaacagaagcgga

SEQ ID NO: 2804 - RNA, 20 nt, synthetic construct
  source 1..20: mol_type = other RNA
cctccaggcagtgtacagca

SEQ ID NO: 2805 - RNA, 20 nt, synthetic construct
  source 1..20: mol_type = other RNA
ttctaccaaatgatcggtag

SEQ ID NO: 2806 - RNA, 20 nt, synthetic construct
  source 1..20: mol_type = other RNA
ctaccaaatgatcggtaggg

SEQ ID NO: 2807 - RNA, 20 nt, synthetic construct
  source 1..20: mol_type = other RNA
caagcaaccatggcaggcca

SEQ ID NO: 2808 - RNA, 20 nt, synthetic construct
  source 1..20: mol_type = other RNA
tatggccagactatcaggtg

SEQ ID NO: 2809 - RNA, 20 nt, synthetic construct
  source 1..20: mol_type = other RNA
cacttgccagcaacaaagta

SEQ ID NO: 2810 - RNA, 20 nt, synthetic construct
  source 1..20: mol_type = other RNA
gctcaatatgccccaggcta

SEQ ID NO: 2811 - RNA, 20 nt, synthetic construct
  source 1..20: mol_type = other RNA
ctttcaagtgctgccctggc

SEQ ID NO: 2812 - RNA, 20 nt, synthetic construct
  source 1..20: mol_type = other RNA
cactccatcggccattcact

SEQ ID NO: 2813 - RNA, 20 nt, synthetic construct
  source 1..20: mol_type = other RNA
gacccaaattttggggtatg

SEQ ID NO: 2814 - RNA, 20 nt, synthetic construct
  source 1..20: mol_type = other RNA
tgcggttccagccttcagga

SEQ ID NO: 2815 - RNA, 20 nt, synthetic construct
  source 1..20: mol_type = other RNA
gtgcggttccagccttcagg

SEQ ID NO: 2816 - RNA, 20 nt, synthetic construct
  source 1..20: mol_type = other RNA
tggcctgccatggttgcttg

SEQ ID NO: 2817 - RNA, 20 nt, synthetic construct
  source 1..20: mol_type = other RNA
ctccttccgacttctccaag

SEQ ID NO: 2818 - RNA, 20 nt, synthetic construct
  source 1..20: mol_type = other RNA
tccttccgacttctccaaga

SEQ ID NO: 2819 - RNA, 20 nt, synthetic construct
  source 1..20: mol_type = other RNA
tctccaagagggccaggcac

SEQ ID NO: 2820 - RNA, 20 nt, synthetic construct
  source 1..20: mol_type = other RNA
ctcaagaccaaaagactgtc

SEQ ID NO: 2821 - RNA, 20 nt, synthetic construct
  source 1..20: mol_type = other RNA
agaccaaaagactgtcagga

SEQ ID NO: 2822 - RNA, 20 nt, synthetic construct
  source 1..20: mol_type = other RNA
cctgccaagtgaatggccga

SEQ ID NO: 2823 - RNA, 20 nt, synthetic construct
  source 1..20: mol_type = other RNA
ctcccagcggcgaacgtgtc

SEQ ID NO: 2824 - RNA, 20 nt, synthetic construct
  source 1..20: mol_type = other RNA
cagcggcgaacgtgtcagga

SEQ ID NO: 2825 - RNA, 20 nt, synthetic construct
  source 1..20: mol_type = other RNA
cggcgaacgtgtcaggaagg

SEQ ID NO: 2826 - RNA, 20 nt, synthetic construct
  source 1..20: mol_type = other RNA
cgtgtcaggaaggtggctct

SEQ ID NO: 2827 - RNA, 20 nt, synthetic construct
  source 1..20: mol_type = other RNA
ttttctaccaaatgatcggt

SEQ ID NO: 2828 - RNA, 20 nt, synthetic construct
  source 1..20: mol_type = other RNA
tttctaccaaatgatcggta

SEQ ID NO: 2829 - RNA, 20 nt, synthetic construct
  source 1..20: mol_type = other RNA
gcaacaaagtaagacatact

SEQ ID NO: 2830 - RNA, 20 nt, synthetic construct
  source 1..20: mol_type = other RNA
acctctttcaagtgctgccc

SEQ ID NO: 2831 - RNA, 20 nt, synthetic construct
  source 1..20: mol_type = other RNA
gaaactccaagatgaggatt

SEQ ID NO: 2832 - RNA, 20 nt, synthetic construct
  source 1..20: mol_type = other RNA
aaactccaagatgaggattt

SEQ ID NO: 2833 - RNA, 21 nt, synthetic construct
  source 1..21: mol_type = other RNA
ttctccaagagggccaggcac

SEQ ID NO: 2834 - RNA, 21 nt, synthetic construct
  source 1..21: mol_type = other RNA
ttctccaagagggccaggcac

SEQ ID NO: 2835 - RNA, 21 nt, synthetic construct
  source 1..21: mol_type = other RNA
accaaaagactgtcaggaagg

SEQ ID NO: 2836 - RNA, 21 nt, synthetic construct
  source 1..21: mol_type = other RNA
accaaaagactgtcaggaagg

SEQ ID NO: 2837 - RNA, 21 nt, synthetic construct
  source 1..21: mol_type = other RNA
acctgccaagtgaatggccga

SEQ ID NO: 2838 - RNA, 21 nt, synthetic construct
  source 1..21: mol_type = other RNA
acctgccaagtgaatggccga

SEQ ID NO: 2839 - RNA, 21 nt, synthetic construct
  source 1..21: mol_type = other RNA
gagcaacatgtgttcaaagtc

SEQ ID NO: 2840 - RNA, 21 nt, synthetic construct
  source 1..21: mol_type = other RNA
gagcaacatgtgttcaaagtc

SEQ ID NO: 2841 - RNA, 21 nt, synthetic construct
  source 1..21: mol_type = other RNA
gctccaggaccccgtagatct

SEQ ID NO: 2842 - RNA, 21 nt, synthetic construct
  source 1..21: mol_type = other RNA
gctccaggaccccgtagatct

SEQ ID NO: 2843 - RNA, 21 nt, synthetic construct
  source 1..21: mol_type = other RNA
ttcagggtgctccaggacccc

SEQ ID NO: 2844 - RNA, 21 nt, synthetic construct
  source 1..21: mol_type = other RNA
ttcagggtgctccaggacccc

SEQ ID NO: 2845 - RNA, 21 nt, synthetic construct
  source 1..21: mol_type = other RNA
ggggccagtattccccgttct

SEQ ID NO: 2846 - RNA, 21 nt, synthetic construct
  source 1..21: mol_type = other RNA
ggggccagtattccccgttct

SEQ ID NO: 2847 - RNA, 21 nt, synthetic construct
  source 1..21: mol_type = other RNA
actccatcggccattcacttg

SEQ ID NO: 2848 - RNA, 21 nt, synthetic construct
  source 1..21: mol_type = other RNA
actccatcggccattcacttg

SEQ ID NO: 2849 - RNA, 21 nt, synthetic construct
  source 1..21: mol_type = other RNA
tggcctgccatggttgcttgt

SEQ ID NO: 2850 - RNA, 21 nt, synthetic construct
  source 1..21: mol_type = other RNA
tggcctgccatggttgcttgt

SEQ ID NO: 2851 - RNA, 21 nt, synthetic construct
  source 1..21: mol_type = other RNA
tcttggcctgccatggttgct

SEQ ID NO: 2852 - RNA, 21 nt, synthetic construct
  source 1..21: mol_type = other RNA
tcttggcctgccatggttgct

SEQ ID NO: 2853 - RNA, 21 nt, synthetic construct
  source 1..21: mol_type = other RNA
tcagccagggcagcacttgaa

SEQ ID NO: 2854 - RNA, 21 nt, synthetic construct
  source 1..21: mol_type = other RNA
tcagccagggcagcacttgaa

SEQ ID NO: 2855 - RNA, 21 nt, synthetic construct
  source 1..21: mol_type = other RNA
atcgcacctgccaagtgaatg

SEQ ID NO: 2856 - RNA, 21 nt, synthetic construct
  source 1..21: mol_type = other RNA
atcgcacctgccaagtgaatg

SEQ ID NO: 2857 - RNA, 21 nt, synthetic construct
  source 1..21: mol_type = other RNA
tggccgatggagtgggcagac

SEQ ID NO: 2858 - RNA, 21 nt, synthetic construct
  source 1..21: mol_type = other RNA
tggccgatggagtgggcagac

SEQ ID NO: 2859 - RNA, 21 nt, synthetic construct
  source 1..21: mol_type = other RNA
tcccagcggcgaacgtgtcag

SEQ ID NO: 2860 - RNA, 21 nt, synthetic construct
  source 1..21: mol_type = other RNA
tcccagcggcgaacgtgtcag

SEQ ID NO: 2861 - RNA, 21 nt, synthetic construct
  source 1..21: mol_type = other RNA
cccaggggaacaacagaagcg

SEQ ID NO: 2862 - RNA, 21 nt, synthetic construct
  source 1..21: mol_type = other RNA
cccaggggaacaacagaagcg

SEQ ID NO: 2863 - RNA, 21 nt, synthetic construct
  source 1..21: mol_type = other RNA
gtcacgaagcagctcaatgaa

SEQ ID NO: 2864 - RNA, 21 nt, synthetic construct
  source 1..21: mol_type = other RNA
gtcacgaagcagctcaatgaa

SEQ ID NO: 2865 - RNA, 21 nt, synthetic construct
  source 1..21: mol_type = other RNA
ggccctccaggcagtgtacag

SEQ ID NO: 2866 - RNA, 21 nt, synthetic construct
  source 1..21: mol_type = other RNA
ggccctccaggcagtgtacag

SEQ ID NO: 2867 - RNA, 21 nt, synthetic construct
  source 1..21: mol_type = other RNA
tttctaccaaatgatcggtag

SEQ ID NO: 2868 - RNA, 21 nt, synthetic construct
  source 1..21: mol_type = other RNA
tttctaccaaatgatcggtag

SEQ ID NO: 2869 - RNA, 21 nt, synthetic construct
  source 1..21: mol_type = other RNA
gcaaccatggcaggccaagat

SEQ ID NO: 2870 - RNA, 21 nt, synthetic construct
  source 1..21: mol_type = other RNA
gcaaccatggcaggccaagat

SEQ ID NO: 2871 - DNA, 23 bp, synthetic construct
  source 1..23: mol_type = other DNA
aaaaggctgggggctggtgggga

SEQ ID NO: 2872 - DNA, 23 bp, synthetic construct
  source 1..23: mol_type = other DNA
aaaaggctgggggctggtgggga

SEQ ID NO: 2873 - DNA, 23 bp, synthetic construct
  source 1..23: mol_type = other DNA
aaaaggctgggggctggtgggga

SEQ ID NO: 2874 - DNA, 22 bp, synthetic construct
  source 1..22: mol_type = other DNA
aaaaggctgggggctggtgggg

SEQ ID NO: 2875 - DNA, 22 bp, synthetic construct
  source 1..22: mol_type = other DNA
aaaaggctgggggctggtgggg

SEQ ID NO: 2876 - DNA, 23 bp, synthetic construct
  source 1..23: mol_type = other DNA
aaaaggctgggggctggtgggga

SEQ ID NO: 2877 - DNA, 23 bp, synthetic construct
  source 1..23: mol_type = other DNA
aaaaggctgggggctggtgggga

SEQ ID NO: 2878 - DNA, 23 bp, synthetic construct
  source 1..23: mol_type = other DNA
aaaaggctgggggctggtgggga

SEQ ID NO: 2879 - DNA, 23 bp, synthetic construct
  source 1..23: mol_type = other DNA
aaaggctgggggctggtggggag

SEQ ID NO: 2880 - DNA, 23 bp, synthetic construct
  source 1..23: mol_type = other DNA
aaaggctgggggctggtggggag

SEQ ID NO: 2881 - DNA, 23 bp, synthetic construct
  source 1..23: mol_type = other DNA
aaaggctgggggctggtggggag

SEQ ID NO: 2882 - DNA, 24 bp, synthetic construct
  source 1..24: mol_type = other DNA
aaaggctgggggctggtggggagc

SEQ ID NO: 2883 - DNA, 23 bp, synthetic construct
  source 1..23: mol_type = other DNA
aaggctgggggctggtggggagc

SEQ ID NO: 2884 - DNA, 23 bp, synthetic construct
  source 1..23: mol_type = other DNA
aaggctgggggctggtggggagc

SEQ ID NO: 2885 - DNA, 23 bp, synthetic construct
  source 1..23: mol_type = other DNA
aaggctgggggctggtggggagc

SEQ ID NO: 2886 - DNA, 22 bp, synthetic construct
  source 1..22: mol_type = other DNA
aaggctgggggctggtggggag

SEQ ID NO: 2887 - DNA, 22 bp, synthetic construct
  source 1..22: mol_type = other DNA
aaggctgggggctggtggggag

SEQ ID NO: 2888 - DNA, 23 bp, synthetic construct
  source 1..23: mol_type = other DNA
aaggctgggggctggtggggagc

SEQ ID NO: 2889 - DNA, 23 bp, synthetic construct
  source 1..23: mol_type = other DNA
aaggctgggggctggtggggagc

SEQ ID NO: 2890 - DNA, 23 bp, synthetic construct
  source 1..23: mol_type = other DNA
aaggctgggggctggtggggagc

SEQ ID NO: 2891 - DNA, 24 bp, synthetic construct
  source 1..24: mol_type = other DNA
aaggctgggggctggtggggagca

SEQ ID NO: 2892 - DNA, 24 bp, synthetic construct
  source 1..24: mol_type = other DNA
aaggctgggggctggtggggagca

SEQ ID NO: 2893 - DNA, 23 bp, synthetic construct
  source 1..23: mol_type = other DNA
aatctgtgttctggcacctgcgg

SEQ ID NO: 2894 - DNA, 23 bp, synthetic construct
  source 1..23: mol_type = other DNA
aatctgtgttctggcacctgcgg

SEQ ID NO: 2895 - DNA, 23 bp, synthetic construct
  source 1..23: mol_type = other DNA
aatctgtgttctggcacctgcgg

SEQ ID NO: 2896 - DNA, 23 bp, synthetic construct
  source 1..23: mol_type = other DNA
aatctgtgttctggcacctgcgg

SEQ ID NO: 2897 - DNA, 22 bp, synthetic construct
  source 1..22: mol_type = other DNA
aatctgtgttctggcacctgcg

SEQ ID NO: 2898 - DNA, 22 bp, synthetic construct
  source 1..22: mol_type = other DNA
aatctgtgttctggcacctgcg

SEQ ID NO: 2899 - DNA, 23 bp, synthetic construct
  source 1..23: mol_type = other DNA
aatctgtgttctggcacctgcgg

SEQ ID NO: 2900 - DNA, 23 bp, synthetic construct
  source 1..23: mol_type = other DNA
aatctgtgttctggcacctgcgg

SEQ ID NO: 2901 - DNA, 23 bp, synthetic construct
  source 1..23: mol_type = other DNA
aatctgtgttctggcacctgcgg

SEQ ID NO: 2902 - DNA, 24 bp, synthetic construct
  source 1..24: mol_type = other DNA
aatctgtgttctggcacctgcggc

SEQ ID NO: 2903 - DNA, 23 bp, synthetic construct
  source 1..23: mol_type = other DNA
acaatctgtgttctggcacctgc

SEQ ID NO: 2904 - DNA, 23 bp, synthetic construct
  source 1..23: mol_type = other DNA
acaatctgtgttctggcacctgc

SEQ ID NO: 2905 - DNA, 23 bp, synthetic construct
  source 1..23: mol_type = other DNA
acaatctgtgttctggcacctgc

SEQ ID NO: 2906 - DNA, 22 bp, synthetic construct
  source 1..22: mol_type = other DNA
acaatctgtgttctggcacctg

SEQ ID NO: 2907 - DNA, 22 bp, synthetic construct
  source 1..22: mol_type = other DNA
acaatctgtgttctggcacctg

SEQ ID NO: 2908 - DNA, 23 bp, synthetic construct
  source 1..23: mol_type = other DNA
acaatctgtgttctggcacctgc

SEQ ID NO: 2909 - DNA, 23 bp, synthetic construct
  source 1..23: mol_type = other DNA
acaatctgtgttctggcacctgc

SEQ ID NO: 2910 - DNA, 23 bp, synthetic construct
  source 1..23: mol_type = other DNA
acaatctgtgttctggcacctgc

SEQ ID NO: 2911 - DNA, 23 bp, synthetic construct
  source 1..23: mol_type = other DNA
acacagattgtataaaaggctgg

SEQ ID NO: 2912 - DNA, 23 bp, synthetic construct
  source 1..23: mol_type = other DNA
acacagattgtataaaaggctgg

SEQ ID NO: 2913 - DNA, 23 bp, synthetic construct
  source 1..23: mol_type = other DNA
acacagattgtataaaaggctgg

SEQ ID NO: 2914 - DNA, 23 bp, synthetic construct
  source 1..23: mol_type = other DNA
acacagattgtataaaaggctgg

SEQ ID NO: 2915 - DNA, 23 bp, synthetic construct
  source 1..23: mol_type = other DNA
acacagattgtataaaaggctgg

SEQ ID NO: 2916 - DNA, 22 bp, synthetic construct
  source 1..22: mol_type = other DNA
acacagattgtataaaaggctg

SEQ ID NO: 2917 - DNA, 22 bp, synthetic construct
  source 1..22: mol_type = other DNA
acacagattgtataaaaggctg

SEQ ID NO: 2918 - DNA, 23 bp, synthetic construct
  source 1..23: mol_type = other DNA
acacagattgtataaaaggctgg

SEQ ID NO: 2919 - DNA, 23 bp, synthetic construct
  source 1..23: mol_type = other DNA
acacagattgtataaaaggctgg

SEQ ID NO: 2920 - DNA, 23 bp, synthetic construct
  source 1..23: mol_type = other DNA
acacagattgtataaaaggctgg

SEQ ID NO: 2921 - DNA, 23 bp, synthetic construct
  source 1..23: mol_type = other DNA
acagattgtataaaaggctgggg

SEQ ID NO: 2922 - DNA, 23 bp, synthetic construct
  source 1..23: mol_type = other DNA
acagattgtataaaaggctgggg

SEQ ID NO: 2923 - DNA, 23 bp, synthetic construct
  source 1..23: mol_type = other DNA
acagattgtataaaaggctgggg

SEQ ID NO: 2924 - DNA, 23 bp, synthetic construct
  source 1..23: mol_type = other DNA
acagattgtataaaaggctgggg

SEQ ID NO: 2925 - DNA, 23 bp, synthetic construct
  source 1..23: mol_type = other DNA
acagattgtataaaaggctgggg

SEQ ID NO: 2926 - DNA, 22 bp, synthetic construct
  source 1..22: mol_type = other DNA
acagattgtataaaaggctggg

SEQ ID NO: 2927 - DNA, 22 bp, synthetic construct
  source 1..22: mol_type = other DNA
acagattgtataaaaggctggg

SEQ ID NO: 2928 - DNA, 23 bp, synthetic construct
  source 1..23: mol_type = other DNA
acagattgtataaaaggctgggg

SEQ ID NO: 2929 - DNA, 23 bp, synthetic construct
  source 1..23: mol_type = other DNA
acagattgtataaaaggctgggg

SEQ ID NO: 2930 - DNA, 23 bp, synthetic construct
  source 1..23: mol_type = other DNA
acagattgtataaaaggctgggg

SEQ ID NO: 2931 - DNA, 23 bp, synthetic construct
  source 1..23: mol_type = other DNA
agaacacagattgtataaaaggc

SEQ ID NO: 2932 - DNA, 23 bp, synthetic construct
  source 1..23: mol_type = other DNA
agaacacagattgtataaaaggc

SEQ ID NO: 2933 - DNA, 22 bp, synthetic construct
  source 1..22: mol_type = other DNA
agaacacagattgtataaaagg

SEQ ID NO: 2934 - DNA, 22 bp, synthetic construct
  source 1..22: mol_type = other DNA
agaacacagattgtataaaagg

SEQ ID NO: 2935 - DNA, 23 bp, synthetic construct
  source 1..23: mol_type = other DNA
agaacacagattgtataaaaggc

SEQ ID NO: 2936 - DNA, 23 bp, synthetic construct
  source 1..23: mol_type = other DNA
agaacacagattgtataaaaggc

SEQ ID NO: 2937 - DNA, 23 bp, synthetic construct
  source 1..23: mol_type = other DNA
agaacacagattgtataaaaggc

SEQ ID NO: 2938 - DNA, 24 bp, synthetic construct
  source 1..24: mol_type = other DNA
agaacacagattgtataaaaggct

SEQ ID NO: 2939 - DNA, 24 bp, synthetic construct
  source 1..24: mol_type = other DNA
agaacacagattgtataaaaggct

SEQ ID NO: 2940 - DNA, 23 bp, synthetic construct
  source 1..23: mol_type = other DNA
agattgtataaaaggctgggggc

SEQ ID NO: 2941 - DNA, 23 bp, synthetic construct
  source 1..23: mol_type = other DNA
agattgtataaaaggctgggggc

SEQ ID NO: 2942 - DNA, 23 bp, synthetic construct
  source 1..23: mol_type = other DNA
agattgtataaaaggctgggggc

SEQ ID NO: 2943 - DNA, 22 bp, synthetic construct
  source 1..22: mol_type = other DNA
agattgtataaaaggctggggg

SEQ ID NO: 2944 - DNA, 22 bp, synthetic construct
  source 1..22: mol_type = other DNA
agattgtataaaaggctggggg

SEQ ID NO: 2945 - DNA, 23 bp, synthetic construct
  source 1..23: mol_type = other DNA
agattgtataaaaggctgggggc

SEQ ID NO: 2946 - DNA, 23 bp, synthetic construct
  source 1..23: mol_type = other DNA
agattgtataaaaggctgggggc

SEQ ID NO: 2947 - DNA, 23 bp, synthetic construct
  source 1..23: mol_type = other DNA
agattgtataaaaggctgggggc

SEQ ID NO: 2948 - DNA, 24 bp, synthetic construct
  source 1..24: mol_type = other DNA
agattgtataaaaggctgggggct

SEQ ID NO: 2949 - DNA, 24 bp, synthetic construct
  source 1..24: mol_type = other DNA
agattgtataaaaggctgggggct

SEQ ID NO: 2950 - DNA, 27 bp, synthetic construct
  source 1..27: mol_type = other DNA
agattgtataaaaggctgggggctggt

SEQ ID NO: 2951 - DNA, 23 bp, synthetic construct
  source 1..23: mol_type = other DNA
ataaaaggctgggggctggtggg

SEQ ID NO: 2952 - DNA, 23 bp, synthetic construct
  source 1..23: mol_type = other DNA
ataaaaggctgggggctggtggg

SEQ ID NO: 2953 - DNA, 23 bp, synthetic construct
  source 1..23: mol_type = other DNA
ataaaaggctgggggctggtggg

SEQ ID NO: 2954 - DNA, 23 bp, synthetic construct
  source 1..23: mol_type = other DNA
ataaaaggctgggggctggtggg

SEQ ID NO: 2955 - DNA, 22 bp, synthetic construct
  source 1..22: mol_type = other DNA
ataaaaggctgggggctggtgg

SEQ ID NO: 2956 - DNA, 22 bp, synthetic construct
  source 1..22: mol_type = other DNA
ataaaaggctgggggctggtgg

SEQ ID NO: 2957 - DNA, 23 bp, synthetic construct
  source 1..23: mol_type = other DNA
ataaaaggctgggggctggtggg

SEQ ID NO: 2958 - DNA, 23 bp, synthetic construct
  source 1..23: mol_type = other DNA
ataaaaggctgggggctggtggg

SEQ ID NO: 2959 - DNA, 23 bp, synthetic construct
  source 1..23: mol_type = other DNA
ataaaaggctgggggctggtggg

SEQ ID NO: 2960 - DNA, 23 bp, synthetic construct
  source 1..23: mol_type = other DNA
atctgtgttctggcacctgcggc

SEQ ID NO: 2961 - DNA, 23 bp, synthetic construct
  source 1..23: mol_type = other DNA
atctgtgttctggcacctgcggc

SEQ ID NO: 2962 - DNA, 22 bp, synthetic construct
  source 1..22: mol_type = other DNA
atctgtgttctggcacctgcgg

SEQ ID NO: 2963 - DNA, 22 bp, synthetic construct
  source 1..22: mol_type = other DNA
atctgtgttctggcacctgcgg

SEQ ID NO: 2964 - DNA, 23 bp, synthetic construct
  source 1..23: mol_type = other DNA
atctgtgttctggcacctgcggc

SEQ ID NO: 2965 - DNA, 23 bp, synthetic construct
  source 1..23: mol_type = other DNA
atctgtgttctggcacctgcggc

SEQ ID NO: 2966 - DNA, 23 bp, synthetic construct
  source 1..23: mol_type = other DNA
atctgtgttctggcacctgcggc

SEQ ID NO: 2967 - DNA, 24 bp, synthetic construct
  source 1..24: mol_type = other DNA
atctgtgttctggcacctgcggct

SEQ ID NO: 2968 - DNA, 24 bp, synthetic construct
  source 1..24: mol_type = other DNA
atctgtgttctggcacctgcggct

SEQ ID NO: 2969 - DNA, 23 bp, synthetic construct
  source 1..23: mol_type = other DNA
cacagattgtataaaaggctggg

SEQ ID NO: 2970 - DNA, 23 bp, synthetic construct
  source 1..23: mol_type = other DNA
cacagattgtataaaaggctggg

SEQ ID NO: 2971 - DNA, 23 bp, synthetic construct
  source 1..23: mol_type = other DNA
cacagattgtataaaaggctggg

SEQ ID NO: 2972 - DNA, 23 bp, synthetic construct
  source 1..23: mol_type = other DNA
cacagattgtataaaaggctggg

SEQ ID NO: 2973 - DNA, 23 bp, synthetic construct
  source 1..23: mol_type = other DNA
cacagattgtataaaaggctggg

SEQ ID NO: 2974 - DNA, 22 bp, synthetic construct
  source 1..22: mol_type = other DNA
cacagattgtataaaaggctgg

SEQ ID NO: 2975 - DNA, 22 bp, synthetic construct
  source 1..22: mol_type = other DNA
cacagattgtataaaaggctgg

SEQ ID NO: 2976 - DNA, 23 bp, synthetic construct
  source 1..23: mol_type = other DNA
cacagattgtataaaaggctggg

SEQ ID NO: 2977 - DNA, 23 bp, synthetic construct
  source 1..23: mol_type = other DNA
cacagattgtataaaaggctggg

SEQ ID NO: 2978 - DNA, 23 bp, synthetic construct
  source 1..23: mol_type = other DNA
cacagattgtataaaaggctggg

SEQ ID NO: 2979 - DNA, 23 bp, synthetic construct
  source 1..23: mol_type = other DNA
cagaacacagattgtataaaagg

SEQ ID NO: 2980 - DNA, 23 bp, synthetic construct
  source 1..23: mol_type = other DNA
cagaacacagattgtataaaagg

SEQ ID NO: 2981 - DNA, 23 bp, synthetic construct
  source 1..23: mol_type = other DNA
cagaacacagattgtataaaagg

SEQ ID NO: 2982 - DNA, 23 bp, synthetic construct
  source 1..23: mol_type = other DNA
cagaacacagattgtataaaagg

SEQ ID NO: 2983 - DNA, 23 bp, synthetic construct
  source 1..23: mol_type = other DNA
cagaacacagattgtataaaagg

SEQ ID NO: 2984 - DNA, 22 bp, synthetic construct
  source 1..22: mol_type = other DNA
cagaacacagattgtataaaag

SEQ ID NO: 2985 - DNA, 22 bp, synthetic construct
  source 1..22: mol_type = other DNA
cagaacacagattgtataaaag

SEQ ID NO: 2986 - DNA, 23 bp, synthetic construct
  source 1..23: mol_type = other DNA
cagaacacagattgtataaaagg

SEQ ID NO: 2987 - DNA, 23 bp, synthetic construct
  source 1..23: mol_type = other DNA
cagaacacagattgtataaaagg

SEQ ID NO: 2988 - DNA, 23 bp, synthetic construct
  source 1..23: mol_type = other DNA
cagaacacagattgtataaaagg

SEQ ID NO: 2989 - DNA, 24 bp, synthetic construct
  source 1..24: mol_type = other DNA
cagaacacagattgtataaaaggc

SEQ ID NO: 2990 - DNA, 23 bp, synthetic construct
  source 1..23: mol_type = other DNA
cagattgtataaaaggctggggg

SEQ ID NO: 2991 - DNA, 23 bp, synthetic construct
  source 1..23: mol_type = other DNA
cagattgtataaaaggctggggg

SEQ ID NO: 2992 - DNA, 23 bp, synthetic construct
  source 1..23: mol_type = other DNA
cagattgtataaaaggctggggg

SEQ ID NO: 2993 - DNA, 23 bp, synthetic construct
  source 1..23: mol_type = other DNA
cagattgtataaaaggctggggg

SEQ ID NO: 2994 - DNA, 23 bp, synthetic construct
  source 1..23: mol_type = other DNA
cagattgtataaaaggctggggg

SEQ ID NO: 2995 - DNA, 22 bp, synthetic construct
  source 1..22: mol_type = other DNA
cagattgtataaaaggctgggg

SEQ ID NO: 2996 - DNA, 22 bp, synthetic construct
  source 1..22: mol_type = other DNA
cagattgtataaaaggctgggg

SEQ ID NO: 2997 - DNA, 23 bp, synthetic construct
  source 1..23: mol_type = other DNA
cagattgtataaaaggctggggg

SEQ ID NO: 2998 - DNA, 23 bp, synthetic construct
  source 1..23: mol_type = other DNA
cagattgtataaaaggctggggg

SEQ ID NO: 2999 - DNA, 23 bp, synthetic construct
  source 1..23: mol_type = other DNA
cagattgtataaaaggctggggg

SEQ ID NO: 3000 - DNA, 24 bp, synthetic construct
  source 1..24: mol_type = other DNA
cagattgtataaaaggctgggggc

SEQ ID NO: 3001 - DNA, 23 bp, synthetic construct
  source 1..23: mol_type = other DNA
cagcccccagccttttatacaat

SEQ ID NO: 3002 - DNA, 23 bp, synthetic construct
  source 1..23: mol_type = other DNA
cagcccccagccttttatacaat

SEQ ID NO: 3003 - DNA, 23 bp, synthetic construct
  source 1..23: mol_type = other DNA
cagcccccagccttttatacaat

SEQ ID NO: 3004 - DNA, 24 bp, synthetic construct
  source 1..24: mol_type = other DNA
cagcccccagccttttatacaatc

SEQ ID NO: 3005 - DNA, 24 bp, synthetic construct
  source 1..24: mol_type = other DNA
cagcccccagccttttatacaatc

SEQ ID NO: 3006 - DNA, 27 bp, synthetic construct
  source 1..27: mol_type = other DNA
ccaccagcccccagccttttatacaat

SEQ ID NO: 3007 - DNA, 23 bp, synthetic construct
  source 1..23: mol_type = other DNA
ccagcccccagccttttatacaa

SEQ ID NO: 3008 - DNA, 23 bp, synthetic construct
  source 1..23: mol_type = other DNA
ccagcccccagccttttatacaa

SEQ ID NO: 3009 - DNA, 23 bp, synthetic construct
  source 1..23: mol_type = other DNA
ccagcccccagccttttatacaa

SEQ ID NO: 3010 - DNA, 24 bp, synthetic construct
  source 1..24: mol_type = other DNA
ccagcccccagccttttatacaat

SEQ ID NO: 3011 - DNA, 22 bp, synthetic construct
  source 1..22: mol_type = other DNA
ccagccttttatacaatctgtg

SEQ ID NO: 3012 - DNA, 22 bp, synthetic construct
  source 1..22: mol_type = other DNA
ccagccttttatacaatctgtg

SEQ ID NO: 3013 - DNA, 23 bp, synthetic construct
  source 1..23: mol_type = other DNA
ccagccttttatacaatctgtgt

SEQ ID NO: 3014 - DNA, 23 bp, synthetic construct
  source 1..23: mol_type = other DNA
ccagccttttatacaatctgtgt

SEQ ID NO: 3015 - DNA, 23 bp, synthetic construct
  source 1..23: mol_type = other DNA
ccagccttttatacaatctgtgt

SEQ ID NO: 3016 - DNA, 24 bp, synthetic construct
  source 1..24: mol_type = other DNA
ccagccttttatacaatctgtgtt

SEQ ID NO: 3017 - DNA, 24 bp, synthetic construct
  source 1..24: mol_type = other DNA
ccagccttttatacaatctgtgtt

SEQ ID NO: 3018 - DNA, 22 bp, synthetic construct
  source 1..22: mol_type = other DNA
ccccagccttttatacaatctg

SEQ ID NO: 3019 - DNA, 22 bp, synthetic construct
  source 1..22: mol_type = other DNA
ccccagccttttatacaatctg

SEQ ID NO: 3020 - DNA, 23 bp, synthetic construct
  source 1..23: mol_type = other DNA
ccccagccttttatacaatctgt

SEQ ID NO: 3021 - DNA, 23 bp, synthetic construct
  source 1..23: mol_type = other DNA
ccccagccttttatacaatctgt

SEQ ID NO: 3022 - DNA, 23 bp, synthetic construct
  source 1..23: mol_type = other DNA
ccccagccttttatacaatctgt

SEQ ID NO: 3023 - DNA, 23 bp, synthetic construct
  source 1..23: mol_type = other DNA
ctgggggctggtggggagcaggg

SEQ ID NO: 3024 - DNA, 23 bp, synthetic construct
  source 1..23: mol_type = other DNA
ctgggggctggtggggagcaggg

SEQ ID NO: 3025 - DNA, 23 bp, synthetic construct
  source 1..23: mol_type = other DNA
ctgggggctggtggggagcaggg

SEQ ID NO: 3026 - DNA, 23 bp, synthetic construct
  source 1..23: mol_type = other DNA
ctgggggctggtggggagcaggg

SEQ ID NO: 3027 - DNA, 23 bp, synthetic construct
  source 1..23: mol_type = other DNA
ctgggggctggtggggagcaggg

SEQ ID NO: 3028 - DNA, 22 bp, synthetic construct
  source 1..22: mol_type = other DNA
ctgggggctggtggggagcagg

SEQ ID NO: 3029 - DNA, 22 bp, synthetic construct
  source 1..22: mol_type = other DNA
ctgggggctggtggggagcagg

SEQ ID NO: 3030 - DNA, 23 bp, synthetic construct
  source 1..23: mol_type = other DNA
ctgggggctggtggggagcaggg

SEQ ID NO: 3031 - DNA, 23 bp, synthetic construct
  source 1..23: mol_type = other DNA
ctgggggctggtggggagcaggg

SEQ ID NO: 3032 - DNA, 23 bp, synthetic construct
  source 1..23: mol_type = other DNA
ctgggggctggtggggagcaggg

SEQ ID NO: 3033 - DNA, 23 bp, synthetic construct
  source 1..23: mol_type = other DNA
cttttatacaatctgtgttctgg

SEQ ID NO: 3034 - DNA, 23 bp, synthetic construct
  source 1..23: mol_type = other DNA
cttttatacaatctgtgttctgg

SEQ ID NO: 3035 - DNA, 23 bp, synthetic construct
  source 1..23: mol_type = other DNA
cttttatacaatctgtgttctgg

SEQ ID NO: 3036 - DNA, 23 bp, synthetic construct
  source 1..23: mol_type = other DNA
cttttatacaatctgtgttctgg

SEQ ID NO: 3037 - DNA, 23 bp, synthetic construct
  source 1..23: mol_type = other DNA
cttttatacaatctgtgttctgg

SEQ ID NO: 3038 - DNA, 22 bp, synthetic construct
  source 1..22: mol_type = other DNA
cttttatacaatctgtgttctg

SEQ ID NO: 3039 - DNA, 22 bp, synthetic construct
  source 1..22: mol_type = other DNA
cttttatacaatctgtgttctg

SEQ ID NO: 3040 - DNA, 23 bp, synthetic construct
  source 1..23: mol_type = other DNA
cttttatacaatctgtgttctgg

SEQ ID NO: 3041 - DNA, 23 bp, synthetic construct
  source 1..23: mol_type = other DNA
cttttatacaatctgtgttctgg

SEQ ID NO: 3042 - DNA, 23 bp, synthetic construct
  source 1..23: mol_type = other DNA
cttttatacaatctgtgttctgg

SEQ ID NO: 3043 - DNA, 24 bp, synthetic construct
  source 1..24: mol_type = other DNA
cttttatacaatctgtgttctggc

SEQ ID NO: 3044 - DNA, 23 bp, synthetic construct
  source 1..23: mol_type = other DNA
gctgggggctggtggggagcagg

SEQ ID NO: 3045 - DNA, 23 bp, synthetic construct
  source 1..23: mol_type = other DNA
gctgggggctggtggggagcagg

SEQ ID NO: 3046 - DNA, 23 bp, synthetic construct
  source 1..23: mol_type = other DNA
gctgggggctggtggggagcagg

SEQ ID NO: 3047 - DNA, 23 bp, synthetic construct
  source 1..23: mol_type = other DNA
gctgggggctggtggggagcagg

SEQ ID NO: 3048 - DNA, 23 bp, synthetic construct
  source 1..23: mol_type = other DNA
gctgggggctggtggggagcagg

SEQ ID NO: 3049 - DNA, 22 bp, synthetic construct
  source 1..22: mol_type = other DNA
gctgggggctggtggggagcag

SEQ ID NO: 3050 - DNA, 22 bp, synthetic construct
  source 1..22: mol_type = other DNA
gctgggggctggtggggagcag

SEQ ID NO: 3051 - DNA, 23 bp, synthetic construct
  source 1..23: mol_type = other DNA
gctgggggctggtggggagcagg

SEQ ID NO: 3052 - DNA, 23 bp, synthetic construct
  source 1..23: mol_type = other DNA
gctgggggctggtggggagcagg

SEQ ID NO: 3053 - DNA, 23 bp, synthetic construct
  source 1..23: mol_type = other DNA
gctgggggctggtggggagcagg

SEQ ID NO: 3054 - DNA, 23 bp, synthetic construct
  source 1..23: mol_type = other DNA
ggctgggggctggtggggagcag

SEQ ID NO: 3055 - DNA, 23 bp, synthetic construct
  source 1..23: mol_type = other DNA
ggctgggggctggtggggagcag

SEQ ID NO: 3056 - DNA, 23 bp, synthetic construct
  source 1..23: mol_type = other DNA
ggctgggggctggtggggagcag

SEQ ID NO: 3057 - DNA, 23 bp, synthetic construct
  source 1..23: mol_type = other DNA
taaaaggctgggggctggtgggg

SEQ ID NO: 3058 - DNA, 23 bp, synthetic construct
  source 1..23: mol_type = other DNA
taaaaggctgggggctggtgggg

SEQ ID NO: 3059 - DNA, 23 bp, synthetic construct
  source 1..23: mol_type = other DNA
taaaaggctgggggctggtgggg

SEQ ID NO: 3060 - DNA, 23 bp, synthetic construct
  source 1..23: mol_type = other DNA
taaaaggctgggggctggtgggg

SEQ ID NO: 3061 - DNA, 22 bp, synthetic construct
  source 1..22: mol_type = other DNA
taaaaggctgggggctggtggg

SEQ ID NO: 3062 - DNA, 22 bp, synthetic construct
  source 1..22: mol_type = other DNA
taaaaggctgggggctggtggg

SEQ ID NO: 3063 - DNA, 23 bp, synthetic construct
  source 1..23: mol_type = other DNA
taaaaggctgggggctggtgggg

SEQ ID NO: 3064 - DNA, 23 bp, synthetic construct
  source 1..23: mol_type = other DNA
taaaaggctgggggctggtgggg

SEQ ID NO: 3065 - DNA, 23 bp, synthetic construct
  source 1..23: mol_type = other DNA
taaaaggctgggggctggtgggg

SEQ ID NO: 3066 - DNA, 24 bp, synthetic construct
  source 1..24: mol_type = other DNA
taaaaggctgggggctggtgggga

SEQ ID NO: 3067 - DNA, 23 bp, synthetic construct
  source 1..23: mol_type = other DNA
tataaaaggctgggggctggtgg

SEQ ID NO: 3068 - DNA, 23 bp, synthetic construct
  source 1..23: mol_type = other DNA
tataaaaggctgggggctggtgg

SEQ ID NO: 3069 - DNA, 23 bp, synthetic construct
  source 1..23: mol_type = other DNA
tataaaaggctgggggctggtgg

SEQ ID NO: 3070 - DNA, 23 bp, synthetic construct
  source 1..23: mol_type = other DNA
tataaaaggctgggggctggtgg

SEQ ID NO: 3071 - DNA, 23 bp, synthetic construct
  source 1..23: mol_type = other DNA
tataaaaggctgggggctggtgg

SEQ ID NO: 3072 - DNA, 22 bp, synthetic construct
  source 1..22: mol_type = other DNA
tataaaaggctgggggctggtg

SEQ ID NO: 3073 - DNA, 22 bp, synthetic construct
  source 1..22: mol_type = other DNA
tataaaaggctgggggctggtg

SEQ ID NO: 3074 - DNA, 23 bp, synthetic construct
  source 1..23: mol_type = other DNA
tataaaaggctgggggctggtgg

SEQ ID NO: 3075 - DNA, 23 bp, synthetic construct
  source 1..23: mol_type = other DNA
tataaaaggctgggggctggtgg

SEQ ID NO: 3076 - DNA, 23 bp, synthetic construct
  source 1..23: mol_type = other DNA
tataaaaggctgggggctggtgg

SEQ ID NO: 3077 - DNA, 26 bp, synthetic construct
  source 1..26: mol_type = other DNA
attgtataaaaggctgggggctggtg

SEQ ID NO: 3078 - DNA, 26 bp, synthetic construct
  source 1..26: mol_type = other DNA
cttttatacaatctgtgttctggcac

SEQ ID NO: 3079 - DNA, 23 bp, synthetic construct
  source 1..23: mol_type = other DNA
tgggggctggtggggagcagggg

SEQ ID NO: 3080 - DNA, 23 bp, synthetic construct
  source 1..23: mol_type = other DNA
tgggggctggtggggagcagggg

SEQ ID NO: 3081 - DNA, 23 bp, synthetic construct
  source 1..23: mol_type = other DNA
tgggggctggtggggagcagggg

SEQ ID NO: 3082 - DNA, 23 bp, synthetic construct
  source 1..23: mol_type = other DNA
tgggggctggtggggagcagggg

SEQ ID NO: 3083 - DNA, 22 bp, synthetic construct
  source 1..22: mol_type = other DNA
tgggggctggtggggagcaggg

SEQ ID NO: 3084 - DNA, 23 bp, synthetic construct
  source 1..23: mol_type = other DNA
tgggggctggtggggagcagggg

SEQ ID NO: 3085 - DNA, 23 bp, synthetic construct
  source 1..23: mol_type = other DNA
tgggggctggtggggagcagggg

SEQ ID NO: 3086 - DNA, 23 bp, synthetic construct
  source 1..23: mol_type = other DNA
tgggggctggtggggagcagggg

SEQ ID NO: 3087 - DNA, 22 bp, synthetic construct
  source 1..22: mol_type = other DNA
tgtataaaaggctgggggctgg

SEQ ID NO: 3088 - DNA, 22 bp, synthetic construct
  source 1..22: mol_type = other DNA
tgtataaaaggctgggggctgg

SEQ ID NO: 3089 - DNA, 23 bp, synthetic construct
  source 1..23: mol_type = other DNA
tgtataaaaggctgggggctggt

SEQ ID NO: 3090 - DNA, 23 bp, synthetic construct
  source 1..23: mol_type = other DNA
tgtataaaaggctgggggctggt

SEQ ID NO: 3091 - DNA, 23 bp, synthetic construct
  source 1..23: mol_type = other DNA
tgtataaaaggctgggggctggt

SEQ ID NO: 3092 - DNA, 23 bp, synthetic construct
  source 1..23: mol_type = other DNA
ttatacaatctgtgttctggcac

SEQ ID NO: 3093 - DNA, 23 bp, synthetic construct
  source 1..23: mol_type = other DNA
ttatacaatctgtgttctggcac

SEQ ID NO: 3094 - DNA, 23 bp, synthetic construct
  source 1..23: mol_type = other DNA
ttatacaatctgtgttctggcac

SEQ ID NO: 3095 - DNA, 24 bp, synthetic construct
  source 1..24: mol_type = other DNA
ttatacaatctgtgttctggcacc

SEQ ID NO: 3096 - DNA, 24 bp, synthetic construct
  source 1..24: mol_type = other DNA
ttatacaatctgtgttctggcacc

SEQ ID NO: 3097 - DNA, 23 bp, synthetic construct
  source 1..23: mol_type = other DNA
ttgtataaaaggctgggggctgg

SEQ ID NO: 3098 - DNA, 23 bp, synthetic construct
  source 1..23: mol_type = other DNA
ttgtataaaaggctgggggctgg

SEQ ID NO: 3099 - DNA, 23 bp, synthetic construct
  source 1..23: mol_type = other DNA
ttgtataaaaggctgggggctgg

SEQ ID NO: 3100 - DNA, 23 bp, synthetic construct
  source 1..23: mol_type = other DNA
ttgtataaaaggctgggggctgg

SEQ ID NO: 3101 - DNA, 23 bp, synthetic construct
  source 1..23: mol_type = other DNA
ttgtataaaaggctgggggctgg

SEQ ID NO: 3102 - DNA, 23 bp, synthetic construct
  source 1..23: mol_type = other DNA
ttgtataaaaggctgggggctgg

SEQ ID NO: 3103 - DNA, 22 bp, synthetic construct
  source 1..22: mol_type = other DNA
ttgtataaaaggctgggggctg

SEQ ID NO: 3104 - DNA, 22 bp, synthetic construct
  source 1..22: mol_type = other DNA
ttgtataaaaggctgggggctg

SEQ ID NO: 3105 - DNA, 23 bp, synthetic construct
  source 1..23: mol_type = other DNA
ttgtataaaaggctgggggctgg

SEQ ID NO: 3106 - DNA, 23 bp, synthetic construct
  source 1..23: mol_type = other DNA
ttgtataaaaggctgggggctgg

SEQ ID NO: 3107 - DNA, 23 bp, synthetic construct
  source 1..23: mol_type = other DNA
ttgtataaaaggctgggggctgg

SEQ ID NO: 3108 - DNA, 24 bp, synthetic construct
  source 1..24: mol_type = other DNA
ttgtataaaaggctgggggctggt

SEQ ID NO: 3109 - DNA, 23 bp, synthetic construct
  source 1..23: mol_type = other DNA
ttttatacaatctgtgttctggc

SEQ ID NO: 3110 - DNA, 23 bp, synthetic construct
  source 1..23: mol_type = other DNA
ttttatacaatctgtgttctggc

SEQ ID NO: 3111 - DNA, 23 bp, synthetic construct
  source 1..23: mol_type = other DNA
ttttatacaatctgtgttctggc

SEQ ID NO: 3112 - DNA, 22 bp, synthetic construct
  source 1..22: mol_type = other DNA
ttttatacaatctgtgttctgg

SEQ ID NO: 3113 - DNA, 22 bp, synthetic construct
  source 1..22: mol_type = other DNA
ttttatacaatctgtgttctgg

SEQ ID NO: 3114 - DNA, 23 bp, synthetic construct
  source 1..23: mol_type = other DNA
ttttatacaatctgtgttctggc

SEQ ID NO: 3115 - DNA, 23 bp, synthetic construct
  source 1..23: mol_type = other DNA
ttttatacaatctgtgttctggc

SEQ ID NO: 3116 - DNA, 23 bp, synthetic construct
  source 1..23: mol_type = other DNA
ttttatacaatctgtgttctggc

SEQ ID NO: 3117 - DNA, 24 bp, synthetic construct
  source 1..24: mol_type = other DNA
ttttatacaatctgtgttctggca

SEQ ID NO: 3118 - DNA, 24 bp, synthetic construct
  source 1..24: mol_type = other DNA
ttttatacaatctgtgttctggca

SEQ ID NO: 3119 - DNA, 23 bp, synthetic construct
  source 1..23: mol_type = other DNA
aacgccatggggagcaatctcag

SEQ ID NO: 3120 - DNA, 23 bp, synthetic construct
  source 1..23: mol_type = other DNA
aacgccatggggagcaatctcag

SEQ ID NO: 3121 - DNA, 23 bp, synthetic construct
  source 1..23: mol_type = other DNA
acgccatggggagcaatctcagc

SEQ ID NO: 3122 - DNA, 23 bp, synthetic construct
  source 1..23: mol_type = other DNA
acgccatggggagcaatctcagc

SEQ ID NO: 3123 - DNA, 22 bp, synthetic construct
  source 1..22: mol_type = other DNA
acgccatggggagcaatctcag

SEQ ID NO: 3124 - DNA, 23 bp, synthetic construct
  source 1..23: mol_type = other DNA
acgccatggggagcaatctcagc

SEQ ID NO: 3125 - DNA, 23 bp, synthetic construct
  source 1..23: mol_type = other DNA
acgccatggggagcaatctcagc

SEQ ID NO: 3126 - DNA, 24 bp, synthetic construct
  source 1..24: mol_type = other DNA
acgccatggggagcaatctcagcc

SEQ ID NO: 3127 - DNA, 23 bp, synthetic construct
  source 1..23: mol_type = other DNA
agattgctccccatggcgttgga

SEQ ID NO: 3128 - DNA, 26 bp, synthetic construct
  source 1..26: mol_type = other DNA
cttccaacgccatggggagcaatctc

SEQ ID NO: 3129 - DNA, 22 bp, synthetic construct
  source 1..22: mol_type = other DNA
ccatggcgttggaaggcaggag

SEQ ID NO: 3130 - DNA, 23 bp, synthetic construct
  source 1..23: mol_type = other DNA
ccatggcgttggaaggcaggaga

SEQ ID NO: 3131 - DNA, 23 bp, synthetic construct
  source 1..23: mol_type = other DNA
ccatggcgttggaaggcaggaga

SEQ ID NO: 3132 - DNA, 23 bp, synthetic construct
  source 1..23: mol_type = other DNA
ccatggcgttggaaggcaggaga

SEQ ID NO: 3133 - DNA, 23 bp, synthetic construct
  source 1..23: mol_type = other DNA
cccatggcgttggaaggcaggag

SEQ ID NO: 3134 - DNA, 23 bp, synthetic construct
  source 1..23: mol_type = other DNA
cccatggcgttggaaggcaggag

SEQ ID NO: 3135 - DNA, 23 bp, synthetic construct
  source 1..23: mol_type = other DNA
cccatggcgttggaaggcaggag

SEQ ID NO: 3136 - DNA, 24 bp, synthetic construct
  source 1..24: mol_type = other DNA
cccatggcgttggaaggcaggaga

SEQ ID NO: 3137 - DNA, 23 bp, synthetic construct
  source 1..23: mol_type = other DNA
ccccatggcgttggaaggcagga

SEQ ID NO: 3138 - DNA, 22 bp, synthetic construct
  source 1..22: mol_type = other DNA
ccccatggcgttggaaggcagg

SEQ ID NO: 3139 - DNA, 22 bp, synthetic construct
  source 1..22: mol_type = other DNA
ccccatggcgttggaaggcagg

SEQ ID NO: 3140 - DNA, 23 bp, synthetic construct
  source 1..23: mol_type = other DNA
ccccatggcgttggaaggcagga

SEQ ID NO: 3141 - DNA, 23 bp, synthetic construct
  source 1..23: mol_type = other DNA
ccccatggcgttggaaggcagga

SEQ ID NO: 3142 - DNA, 23 bp, synthetic construct
  source 1..23: mol_type = other DNA
ccccatggcgttggaaggcagga

SEQ ID NO: 3143 - DNA, 23 bp, synthetic construct
  source 1..23: mol_type = other DNA
ccccatggcgttggaaggcagga

SEQ ID NO: 3144 - DNA, 23 bp, synthetic construct
  source 1..23: mol_type = other DNA
ccccatggcgttggaaggcagga

SEQ ID NO: 3145 - DNA, 23 bp, synthetic construct
  source 1..23: mol_type = other DNA
ctccccatggcgttggaaggcag

SEQ ID NO: 3146 - DNA, 23 bp, synthetic construct
  source 1..23: mol_type = other DNA
ctccccatggcgttggaaggcag

SEQ ID NO: 3147 - DNA, 23 bp, synthetic construct
  source 1..23: mol_type = other DNA
ctccccatggcgttggaaggcag

SEQ ID NO: 3148 - DNA, 26 bp, synthetic construct
  source 1..26: mol_type = other DNA
attgctccccatggcgttggaaggca

SEQ ID NO: 3149 - DNA, 23 bp, synthetic construct
  source 1..23: mol_type = other DNA
gagattgctccccatggcgttgg

SEQ ID NO: 3150 - DNA, 23 bp, synthetic construct
  source 1..23: mol_type = other DNA
tccccatggcgttggaaggcagg

SEQ ID NO: 3151 - DNA, 22 bp, synthetic construct
  source 1..22: mol_type = other DNA
tccccatggcgttggaaggcag

SEQ ID NO: 3152 - DNA, 22 bp, synthetic construct
  source 1..22: mol_type = other DNA
tccccatggcgttggaaggcag

SEQ ID NO: 3153 - DNA, 23 bp, synthetic construct
  source 1..23: mol_type = other DNA
tccccatggcgttggaaggcagg

SEQ ID NO: 3154 - DNA, 23 bp, synthetic construct
  source 1..23: mol_type = other DNA
tccccatggcgttggaaggcagg

SEQ ID NO: 3155 - DNA, 23 bp, synthetic construct
  source 1..23: mol_type = other DNA
tccccatggcgttggaaggcagg

SEQ ID NO: 3156 - DNA, 23 bp, synthetic construct
  source 1..23: mol_type = other DNA
tccccatggcgttggaaggcagg

SEQ ID NO: 3157 - DNA, 24 bp, synthetic construct
  source 1..24: mol_type = other DNA
tccccatggcgttggaaggcagga

SEQ ID NO: 3158 - DNA, 23 bp, synthetic construct
  source 1..23: mol_type = other DNA
tccccatggcgttggaaggcagg

SEQ ID NO: 3159 - DNA, 23 bp, synthetic construct
  source 1..23: mol_type = other DNA
tccccatggcgttggaaggcagg

SEQ ID NO: 3160 - DNA, 23 bp, synthetic construct
  source 1..23: mol_type = other DNA
tccccatggcgttggaaggcagg

SEQ ID NO: 3161 - DNA, 23 bp, synthetic construct
  source 1..23: mol_type = other DNA
tgctccccatggcgttggaaggc

SEQ ID NO: 3162 - DNA, 23 bp, synthetic construct
  source 1..23: mol_type = other DNA
tgctccccatggcgttggaaggc

SEQ ID NO: 3163 - DNA, 22 bp, synthetic construct
  source 1..22: mol_type = other DNA
tgctccccatggcgttggaagg

SEQ ID NO: 3164 - DNA, 22 bp, synthetic construct
  source 1..22: mol_type = other DNA
tgctccccatggcgttggaagg

SEQ ID NO: 3165 - DNA, 23 bp, synthetic construct
  source 1..23: mol_type = other DNA
tgctccccatggcgttggaaggc

SEQ ID NO: 3166 - DNA, 23 bp, synthetic construct
  source 1..23: mol_type = other DNA
tgctccccatggcgttggaaggc

SEQ ID NO: 3167 - DNA, 23 bp, synthetic construct
  source 1..23: mol_type = other DNA
tgctccccatggcgttggaaggc

SEQ ID NO: 3168 - DNA, 24 bp, synthetic construct
  source 1..24: mol_type = other DNA
tgctccccatggcgttggaaggca

SEQ ID NO: 3169 - DNA, 24 bp, synthetic construct
  source 1..24: mol_type = other DNA
tgctccccatggcgttggaaggca

SEQ ID NO: 3170 - DNA, 22 bp, synthetic construct
  source 1..22: mol_type = other DNA
ttgctccccatggcgttggaag

SEQ ID NO: 3171 - DNA, 23 bp, synthetic construct
  source 1..23: mol_type = other DNA
ttgctccccatggcgttggaagg

SEQ ID NO: 3172 - DNA, 23 bp, synthetic construct
  source 1..23: mol_type = other DNA
ttgctccccatggcgttggaagg

SEQ ID NO: 3173 - DNA, 24 bp, synthetic construct
  source 1..24: mol_type = other DNA
ttgctccccatggcgttggaaggc

SEQ ID NO: 3174 - DNA, 23 bp, synthetic construct
  source 1..23: mol_type = other DNA
ttgctccccatggcgttggaagg

SEQ ID NO: 3175 - DNA, 23 bp, synthetic construct
  source 1..23: mol_type = other DNA
ttgctccccatggcgttggaagg

SEQ ID NO: 3176 - DNA, 23 bp, synthetic construct
  source 1..23: mol_type = other DNA
ttgctccccatggcgttggaagg

SEQ ID NO: 3177 - RNA, 20 nt, synthetic construct
  source 1..20: mol_type = other RNA
aaaaggctgggggctggtgg

SEQ ID NO: 3178 - RNA, 20 nt, synthetic construct
  source 1..20: mol_type = other RNA
aaaaggctgggggctggtgg

SEQ ID NO: 3179 - RNA, 20 nt, synthetic construct
  source 1..20: mol_type = other RNA
aaaaggctgggggctggtgg

SEQ ID NO: 3180 - RNA, 20 nt, synthetic construct
  source 1..20: mol_type = other RNA
aaaaggctgggggctggtgg

SEQ ID NO: 3181 - RNA, 20 nt, synthetic construct
  source 1..20: mol_type = other RNA
aaaaggctgggggctggtgg

SEQ ID NO: 3182 - RNA, 20 nt, synthetic construct
  source 1..20: mol_type = other RNA
aaaaggctgggggctggtgg

SEQ ID NO: 3183 - RNA, 20 nt, synthetic construct
  source 1..20: mol_type = other RNA
aaaaggctgggggctggtgg

SEQ ID NO: 3184 - RNA, 20 nt, synthetic construct
  source 1..20: mol_type = other RNA
aaaaggctgggggctggtgg

SEQ ID NO: 3185 - RNA, 20 nt, synthetic construct
  source 1..20: mol_type = other RNA
aaaggctgggggctggtggg

SEQ ID NO: 3186 - RNA, 20 nt, synthetic construct
  source 1..20: mol_type = other RNA
aaaggctgggggctggtggg

SEQ ID NO: 3187 - RNA, 20 nt, synthetic construct
  source 1..20: mol_type = other RNA
aaaggctgggggctggtggg

SEQ ID NO: 3188 - RNA, 20 nt, synthetic construct
  source 1..20: mol_type = other RNA
aaaggctgggggctggtggg

SEQ ID NO: 3189 - RNA, 20 nt, synthetic construct
  source 1..20: mol_type = other RNA
aaggctgggggctggtgggg

SEQ ID NO: 3190 - RNA, 20 nt, synthetic construct
  source 1..20: mol_type = other RNA
aaggctgggggctggtgggg

SEQ ID NO: 3191 - RNA, 20 nt, synthetic construct
  source 1..20: mol_type = other RNA
aaggctgggggctggtgggg

SEQ ID NO: 3192 - RNA, 20 nt, synthetic construct
  source 1..20: mol_type = other RNA
aaggctgggggctggtgggg

SEQ ID NO: 3193 - RNA, 20 nt, synthetic construct
  source 1..20: mol_type = other RNA
aaggctgggggctggtgggg

SEQ ID NO: 3194 - RNA, 20 nt, synthetic construct
  source 1..20: mol_type = other RNA
aaggctgggggctggtgggg

SEQ ID NO: 3195 - RNA, 20 nt, synthetic construct
  source 1..20: mol_type = other RNA
aaggctgggggctggtgggg

SEQ ID NO: 3196 - RNA, 20 nt, synthetic construct
  source 1..20: mol_type = other RNA
aaggctgggggctggtgggg

SEQ ID NO: 3197 - RNA, 20 nt, synthetic construct
  source 1..20: mol_type = other RNA
aaggctgggggctggtgggg

SEQ ID NO: 3198 - RNA, 20 nt, synthetic construct
  source 1..20: mol_type = other RNA
aaggctgggggctggtgggg

SEQ ID NO: 3199 - RNA, 20 nt, synthetic construct
  source 1..20: mol_type = other RNA
aatctgtgttctggcacctg

SEQ ID NO: 3200 - RNA, 20 nt, synthetic construct
  source 1..20: mol_type = other RNA
aatctgtgttctggcacctg

SEQ ID NO: 3201 - RNA, 20 nt, synthetic construct
  source 1..20: mol_type = other RNA
aatctgtgttctggcacctg

SEQ ID NO: 3202 - RNA, 20 nt, synthetic construct
  source 1..20: mol_type = other RNA
aatctgtgttctggcacctg

SEQ ID NO: 3203 - RNA, 20 nt, synthetic construct
  source 1..20: mol_type = other RNA
aatctgtgttctggcacctg

SEQ ID NO: 3204 - RNA, 20 nt, synthetic construct
  source 1..20: mol_type = other RNA
aatctgtgttctggcacctg

SEQ ID NO: 3205 - RNA, 20 nt, synthetic construct
  source 1..20: mol_type = other RNA
aatctgtgttctggcacctg

SEQ ID NO: 3206 - RNA, 20 nt, synthetic construct
  source 1..20: mol_type = other RNA
aatctgtgttctggcacctg

SEQ ID NO: 3207 - RNA, 20 nt, synthetic construct
  source 1..20: mol_type = other RNA
aatctgtgttctggcacctg

SEQ ID NO: 3208 - RNA, 20 nt, synthetic construct
  source 1..20: mol_type = other RNA
aatctgtgttctggcacctg

SEQ ID NO: 3209 - RNA, 20 nt, synthetic construct
  source 1..20: mol_type = other RNA
acaatctgtgttctggcacc

SEQ ID NO: 3210 - RNA, 20 nt, synthetic construct
  source 1..20: mol_type = other RNA
acaatctgtgttctggcacc

SEQ ID NO: 3211 - RNA, 20 nt, synthetic construct
  source 1..20: mol_type = other RNA
acaatctgtgttctggcacc

SEQ ID NO: 3212 - RNA, 20 nt, synthetic construct
  source 1..20: mol_type = other RNA
acaatctgtgttctggcacc

SEQ ID NO: 3213 - RNA, 20 nt, synthetic construct
  source 1..20: mol_type = other RNA
acaatctgtgttctggcacc

SEQ ID NO: 3214 - RNA, 20 nt, synthetic construct
  source 1..20: mol_type = other RNA
acaatctgtgttctggcacc

SEQ ID NO: 3215 - RNA, 20 nt, synthetic construct
  source 1..20: mol_type = other RNA
acaatctgtgttctggcacc

SEQ ID NO: 3216 - RNA, 20 nt, synthetic construct
  source 1..20: mol_type = other RNA
acaatctgtgttctggcacc

SEQ ID NO: 3217 - RNA, 20 nt, synthetic construct
  source 1..20: mol_type = other RNA
acacagattgtataaaaggc

SEQ ID NO: 3218 - RNA, 20 nt, synthetic construct
  source 1..20: mol_type = other RNA
acacagattgtataaaaggc

SEQ ID NO: 3219 - RNA, 20 nt, synthetic construct
  source 1..20: mol_type = other RNA
acacagattgtataaaaggc

SEQ ID NO: 3220 - RNA, 20 nt, synthetic construct
  source 1..20: mol_type = other RNA
acacagattgtataaaaggc

SEQ ID NO: 3221 - RNA, 20 nt, synthetic construct
  source 1..20: mol_type = other RNA
acacagattgtataaaaggc

SEQ ID NO: 3222 - RNA, 20 nt, synthetic construct
  source 1..20: mol_type = other RNA
acacagattgtataaaaggc

SEQ ID NO: 3223 - RNA, 20 nt, synthetic construct
  source 1..20: mol_type = other RNA
acacagattgtataaaaggc

SEQ ID NO: 3224 - RNA, 20 nt, synthetic construct
  source 1..20: mol_type = other RNA
acacagattgtataaaaggc

SEQ ID NO: 3225 - RNA, 20 nt, synthetic construct
  source 1..20: mol_type = other RNA
acacagattgtataaaaggc

SEQ ID NO: 3226 - RNA, 20 nt, synthetic construct
  source 1..20: mol_type = other RNA
acacagattgtataaaaggc

SEQ ID NO: 3227 - RNA, 20 nt, synthetic construct
  source 1..20: mol_type = other RNA
acagattgtataaaaggctg

SEQ ID NO: 3228 - RNA, 20 nt, synthetic construct
  source 1..20: mol_type = other RNA
acagattgtataaaaggctg

SEQ ID NO: 3229 - RNA, 20 nt, synthetic construct
  source 1..20: mol_type = other RNA
acagattgtataaaaggctg

SEQ ID NO: 3230 - RNA, 20 nt, synthetic construct
  source 1..20: mol_type = other RNA
acagattgtataaaaggctg

SEQ ID NO: 3231 - RNA, 20 nt, synthetic construct
  source 1..20: mol_type = other RNA
acagattgtataaaaggctg

SEQ ID NO: 3232 - RNA, 20 nt, synthetic construct
  source 1..20: mol_type = other RNA
acagattgtataaaaggctg

SEQ ID NO: 3233 - RNA, 20 nt, synthetic construct
  source 1..20: mol_type = other RNA
acagattgtataaaaggctg

SEQ ID NO: 3234 - RNA, 20 nt, synthetic construct
  source 1..20: mol_type = other RNA
acagattgtataaaaggctg

SEQ ID NO: 3235 - RNA, 20 nt, synthetic construct
  source 1..20: mol_type = other RNA
acagattgtataaaaggctg

SEQ ID NO: 3236 - RNA, 20 nt, synthetic construct
  source 1..20: mol_type = other RNA
acagattgtataaaaggctg

SEQ ID NO: 3237 - RNA, 20 nt, synthetic construct
  source 1..20: mol_type = other RNA
agaacacagattgtataaaa

SEQ ID NO: 3238 - RNA, 20 nt, synthetic construct
  source 1..20: mol_type = other RNA
agaacacagattgtataaaa

SEQ ID NO: 3239 - RNA, 20 nt, synthetic construct
  source 1..20: mol_type = other RNA
agaacacagattgtataaaa

SEQ ID NO: 3240 - RNA, 20 nt, synthetic construct
  source 1..20: mol_type = other RNA
agaacacagattgtataaaa

SEQ ID NO: 3241 - RNA, 20 nt, synthetic construct
  source 1..20: mol_type = other RNA
agaacacagattgtataaaa

SEQ ID NO: 3242 - RNA, 20 nt, synthetic construct
  source 1..20: mol_type = other RNA
agaacacagattgtataaaa

SEQ ID NO: 3243 - RNA, 20 nt, synthetic construct
  source 1..20: mol_type = other RNA
agaacacagattgtataaaa

SEQ ID NO: 3244 - RNA, 20 nt, synthetic construct
  source 1..20: mol_type = other RNA
agaacacagattgtataaaa

SEQ ID NO: 3245 - RNA, 20 nt, synthetic construct
  source 1..20: mol_type = other RNA
agaacacagattgtataaaa

SEQ ID NO: 3246 - RNA, 20 nt, synthetic construct
  source 1..20: mol_type = other RNA
agattgtataaaaggctggg

SEQ ID NO: 3247 - RNA, 20 nt, synthetic construct
  source 1..20: mol_type = other RNA
agattgtataaaaggctggg

SEQ ID NO: 3248 - RNA, 20 nt, synthetic construct
  source 1..20: mol_type = other RNA
agattgtataaaaggctggg

SEQ ID NO: 3249 - RNA, 20 nt, synthetic construct
  source 1..20: mol_type = other RNA
agattgtataaaaggctggg

SEQ ID NO: 3250 - RNA, 20 nt, synthetic construct
  source 1..20: mol_type = other RNA
agattgtataaaaggctggg

SEQ ID NO: 3251 - RNA, 20 nt, synthetic construct
  source 1..20: mol_type = other RNA
agattgtataaaaggctggg

SEQ ID NO: 3252 - RNA, 20 nt, synthetic construct
  source 1..20: mol_type = other RNA
agattgtataaaaggctggg

SEQ ID NO: 3253 - RNA, 20 nt, synthetic construct
  source 1..20: mol_type = other RNA
agattgtataaaaggctggg

SEQ ID NO: 3254 - RNA, 20 nt, synthetic construct
  source 1..20: mol_type = other RNA
agattgtataaaaggctggg

SEQ ID NO: 3255 - RNA, 20 nt, synthetic construct
  source 1..20: mol_type = other RNA
agattgtataaaaggctggg

SEQ ID NO: 3256 - RNA, 21 nt, synthetic construct
  source 1..21: mol_type = other RNA
agattgtataaaaggctgggg

SEQ ID NO: 3257 - RNA, 20 nt, synthetic construct
  source 1..20: mol_type = other RNA
ataaaaggctgggggctggt

SEQ ID NO: 3258 - RNA, 20 nt, synthetic construct
  source 1..20: mol_type = other RNA
ataaaaggctgggggctggt

SEQ ID NO: 3259 - RNA, 20 nt, synthetic construct
  source 1..20: mol_type = other RNA
ataaaaggctgggggctggt

SEQ ID NO: 3260 - RNA, 20 nt, synthetic construct
  source 1..20: mol_type = other RNA
ataaaaggctgggggctggt

SEQ ID NO: 3261 - RNA, 20 nt, synthetic construct
  source 1..20: mol_type = other RNA
ataaaaggctgggggctggt

SEQ ID NO: 3262 - RNA, 20 nt, synthetic construct
  source 1..20: mol_type = other RNA
ataaaaggctgggggctggt

SEQ ID NO: 3263 - RNA, 20 nt, synthetic construct
  source 1..20: mol_type = other RNA
ataaaaggctgggggctggt

SEQ ID NO: 3264 - RNA, 20 nt, synthetic construct
  source 1..20: mol_type = other RNA
ataaaaggctgggggctggt

SEQ ID NO: 3265 - RNA, 20 nt, synthetic construct
  source 1..20: mol_type = other RNA
ataaaaggctgggggctggt

SEQ ID NO: 3266 - RNA, 20 nt, synthetic construct
  source 1..20: mol_type = other RNA
atctgtgttctggcacctgc

SEQ ID NO: 3267 - RNA, 20 nt, synthetic construct
  source 1..20: mol_type = other RNA
atctgtgttctggcacctgc

SEQ ID NO: 3268 - RNA, 20 nt, synthetic construct
  source 1..20: mol_type = other RNA
atctgtgttctggcacctgc

SEQ ID NO: 3269 - RNA, 20 nt, synthetic construct
  source 1..20: mol_type = other RNA
atctgtgttctggcacctgc

SEQ ID NO: 3270 - RNA, 20 nt, synthetic construct
  source 1..20: mol_type = other RNA
atctgtgttctggcacctgc

SEQ ID NO: 3271 - RNA, 20 nt, synthetic construct
  source 1..20: mol_type = other RNA
atctgtgttctggcacctgc

SEQ ID NO: 3272 - RNA, 20 nt, synthetic construct
  source 1..20: mol_type = other RNA
atctgtgttctggcacctgc

SEQ ID NO: 3273 - RNA, 20 nt, synthetic construct
  source 1..20: mol_type = other RNA
atctgtgttctggcacctgc

SEQ ID NO: 3274 - RNA, 20 nt, synthetic construct
  source 1..20: mol_type = other RNA
atctgtgttctggcacctgc

SEQ ID NO: 3275 - RNA, 20 nt, synthetic construct
  source 1..20: mol_type = other RNA
cacagattgtataaaaggct

SEQ ID NO: 3276 - RNA, 20 nt, synthetic construct
  source 1..20: mol_type = other RNA
cacagattgtataaaaggct

SEQ ID NO: 3277 - RNA, 20 nt, synthetic construct
  source 1..20: mol_type = other RNA
cacagattgtataaaaggct

SEQ ID NO: 3278 - RNA, 20 nt, synthetic construct
  source 1..20: mol_type = other RNA
cacagattgtataaaaggct

SEQ ID NO: 3279 - RNA, 20 nt, synthetic construct
  source 1..20: mol_type = other RNA
cacagattgtataaaaggct

SEQ ID NO: 3280 - RNA, 20 nt, synthetic construct
  source 1..20: mol_type = other RNA
cacagattgtataaaaggct

SEQ ID NO: 3281 - RNA, 20 nt, synthetic construct
  source 1..20: mol_type = other RNA
cacagattgtataaaaggct

SEQ ID NO: 3282 - RNA, 20 nt, synthetic construct
  source 1..20: mol_type = other RNA
cacagattgtataaaaggct

SEQ ID NO: 3283 - RNA, 20 nt, synthetic construct
  source 1..20: mol_type = other RNA
cacagattgtataaaaggct

SEQ ID NO: 3284 - RNA, 20 nt, synthetic construct
  source 1..20: mol_type = other RNA
cacagattgtataaaaggct

SEQ ID NO: 3285 - RNA, 20 nt, synthetic construct
  source 1..20: mol_type = other RNA
cagaacacagattgtataaa

SEQ ID NO: 3286 - RNA, 20 nt, synthetic construct
  source 1..20: mol_type = other RNA
cagaacacagattgtataaa

SEQ ID NO: 3287 - RNA, 20 nt, synthetic construct
  source 1..20: mol_type = other RNA
cagaacacagattgtataaa

SEQ ID NO: 3288 - RNA, 20 nt, synthetic construct
  source 1..20: mol_type = other RNA
cagaacacagattgtataaa

SEQ ID NO: 3289 - RNA, 20 nt, synthetic construct
  source 1..20: mol_type = other RNA
cagaacacagattgtataaa

SEQ ID NO: 3290 - RNA, 20 nt, synthetic construct
  source 1..20: mol_type = other RNA
cagaacacagattgtataaa

SEQ ID NO: 3291 - RNA, 20 nt, synthetic construct
  source 1..20: mol_type = other RNA
cagaacacagattgtataaa

SEQ ID NO: 3292 - RNA, 20 nt, synthetic construct
  source 1..20: mol_type = other RNA
cagaacacagattgtataaa

SEQ ID NO: 3293 - RNA, 20 nt, synthetic construct
  source 1..20: mol_type = other RNA
cagaacacagattgtataaa

SEQ ID NO: 3294 - RNA, 20 nt, synthetic construct
  source 1..20: mol_type = other RNA
cagaacacagattgtataaa

SEQ ID NO: 3295 - RNA, 20 nt, synthetic construct
  source 1..20: mol_type = other RNA
cagaacacagattgtataaa

SEQ ID NO: 3296 - RNA, 20 nt, synthetic construct
  source 1..20: mol_type = other RNA
cagattgtataaaaggctgg

SEQ ID NO: 3297 - RNA, 20 nt, synthetic construct
  source 1..20: mol_type = other RNA
cagattgtataaaaggctgg

SEQ ID NO: 3298 - RNA, 20 nt, synthetic construct
  source 1..20: mol_type = other RNA
cagattgtataaaaggctgg

SEQ ID NO: 3299 - RNA, 20 nt, synthetic construct
  source 1..20: mol_type = other RNA
cagattgtataaaaggctgg

SEQ ID NO: 3300 - RNA, 20 nt, synthetic construct
  source 1..20: mol_type = other RNA
cagattgtataaaaggctgg

SEQ ID NO: 3301 - RNA, 20 nt, synthetic construct
  source 1..20: mol_type = other RNA
cagattgtataaaaggctgg

SEQ ID NO: 3302 - RNA, 20 nt, synthetic construct
  source 1..20: mol_type = other RNA
cagattgtataaaaggctgg

SEQ ID NO: 3303 - RNA, 20 nt, synthetic construct
  source 1..20: mol_type = other RNA
cagattgtataaaaggctgg

SEQ ID NO: 3304 - RNA, 20 nt, synthetic construct
  source 1..20: mol_type = other RNA
cagattgtataaaaggctgg

SEQ ID NO: 3305 - RNA, 20 nt, synthetic construct
  source 1..20: mol_type = other RNA
cagattgtataaaaggctgg

SEQ ID NO: 3306 - RNA, 20 nt, synthetic construct
  source 1..20: mol_type = other RNA
cagattgtataaaaggctgg

SEQ ID NO: 3307 - RNA, 20 nt, synthetic construct
  source 1..20: mol_type = other RNA
cagcccccagccttttatac

SEQ ID NO: 3308 - RNA, 20 nt, synthetic construct
  source 1..20: mol_type = other RNA
cagcccccagccttttatac

SEQ ID NO: 3309 - RNA, 20 nt, synthetic construct
  source 1..20: mol_type = other RNA
cagcccccagccttttatac

SEQ ID NO: 3310 - RNA, 20 nt, synthetic construct
  source 1..20: mol_type = other RNA
cagcccccagccttttatac

SEQ ID NO: 3311 - RNA, 20 nt, synthetic construct
  source 1..20: mol_type = other RNA
cagcccccagccttttatac

SEQ ID NO: 3312 - RNA, 21 nt, synthetic construct
  source 1..21: mol_type = other RNA
ccaccagcccccagcctttta

SEQ ID NO: 3313 - RNA, 20 nt, synthetic construct
  source 1..20: mol_type = other RNA
ccagcccccagccttttata

SEQ ID NO: 3314 - RNA, 20 nt, synthetic construct
  source 1..20: mol_type = other RNA
ccagcccccagccttttata

SEQ ID NO: 3315 - RNA, 20 nt, synthetic construct
  source 1..20: mol_type = other RNA
ccagcccccagccttttata

SEQ ID NO: 3316 - RNA, 20 nt, synthetic construct
  source 1..20: mol_type = other RNA
ccagcccccagccttttata

SEQ ID NO: 3317 - RNA, 20 nt, synthetic construct
  source 1..20: mol_type = other RNA
ccagccttttatacaatctg

SEQ ID NO: 3318 - RNA, 20 nt, synthetic construct
  source 1..20: mol_type = other RNA
ccagccttttatacaatctg

SEQ ID NO: 3319 - RNA, 20 nt, synthetic construct
  source 1..20: mol_type = other RNA
ccagccttttatacaatctg

SEQ ID NO: 3320 - RNA, 20 nt, synthetic construct
  source 1..20: mol_type = other RNA
ccagccttttatacaatctg

SEQ ID NO: 3321 - RNA, 20 nt, synthetic construct
  source 1..20: mol_type = other RNA
ccagccttttatacaatctg

SEQ ID NO: 3322 - RNA, 20 nt, synthetic construct
  source 1..20: mol_type = other RNA
ccagccttttatacaatctg

SEQ ID NO: 3323 - RNA, 20 nt, synthetic construct
  source 1..20: mol_type = other RNA
ccagccttttatacaatctg

SEQ ID NO: 3324 - RNA, 20 nt, synthetic construct
  source 1..20: mol_type = other RNA
ccccagccttttatacaatc

SEQ ID NO: 3325 - RNA, 20 nt, synthetic construct
  source 1..20: mol_type = other RNA
ccccagccttttatacaatc

SEQ ID NO: 3326 - RNA, 20 nt, synthetic construct
  source 1..20: mol_type = other RNA
ccccagccttttatacaatc

SEQ ID NO: 3327 - RNA, 20 nt, synthetic construct
  source 1..20: mol_type = other RNA
ccccagccttttatacaatc

SEQ ID NO: 3328 - RNA, 20 nt, synthetic construct
  source 1..20: mol_type = other RNA
ccccagccttttatacaatc

SEQ ID NO: 3329 - RNA, 20 nt, synthetic construct
  source 1..20: mol_type = other RNA
ctgggggctggtggggagca

SEQ ID NO: 3330 - RNA, 20 nt, synthetic construct
  source 1..20: mol_type = other RNA
ctgggggctggtggggagca

SEQ ID NO: 3331 - RNA, 20 nt, synthetic construct
  source 1..20: mol_type = other RNA
ctgggggctggtggggagca

SEQ ID NO: 3332 - RNA, 20 nt, synthetic construct
  source 1..20: mol_type = other RNA
ctgggggctggtggggagca

SEQ ID NO: 3333 - RNA, 20 nt, synthetic construct
  source 1..20: mol_type = other RNA
ctgggggctggtggggagca

SEQ ID NO: 3334 - RNA, 20 nt, synthetic construct
  source 1..20: mol_type = other RNA
ctgggggctggtggggagca

SEQ ID NO: 3335 - RNA, 20 nt, synthetic construct
  source 1..20: mol_type = other RNA
ctgggggctggtggggagca

SEQ ID NO: 3336 - RNA, 20 nt, synthetic construct
  source 1..20: mol_type = other RNA
ctgggggctggtggggagca

SEQ ID NO: 3337 - RNA, 20 nt, synthetic construct
  source 1..20: mol_type = other RNA
ctgggggctggtggggagca

SEQ ID NO: 3338 - RNA, 20 nt, synthetic construct
  source 1..20: mol_type = other RNA
ctgggggctggtggggagca

SEQ ID NO: 3339 - RNA, 20 nt, synthetic construct
  source 1..20: mol_type = other RNA
cttttatacaatctgtgttc

SEQ ID NO: 3340 - RNA, 20 nt, synthetic construct
  source 1..20: mol_type = other RNA
cttttatacaatctgtgttc

SEQ ID NO: 3341 - RNA, 20 nt, synthetic construct
  source 1..20: mol_type = other RNA
cttttatacaatctgtgttc

SEQ ID NO: 3342 - RNA, 20 nt, synthetic construct
  source 1..20: mol_type = other RNA
cttttatacaatctgtgttc

SEQ ID NO: 3343 - RNA, 20 nt, synthetic construct
  source 1..20: mol_type = other RNA
cttttatacaatctgtgttc

SEQ ID NO: 3344 - RNA, 20 nt, synthetic construct
  source 1..20: mol_type = other RNA
cttttatacaatctgtgttc

SEQ ID NO: 3345 - RNA, 20 nt, synthetic construct
  source 1..20: mol_type = other RNA
cttttatacaatctgtgttc

SEQ ID NO: 3346 - RNA, 20 nt, synthetic construct
  source 1..20: mol_type = other RNA
cttttatacaatctgtgttc

SEQ ID NO: 3347 - RNA, 20 nt, synthetic construct
  source 1..20: mol_type = other RNA
cttttatacaatctgtgttc

SEQ ID NO: 3348 - RNA, 20 nt, synthetic construct
  source 1..20: mol_type = other RNA
cttttatacaatctgtgttc

SEQ ID NO: 3349 - RNA, 20 nt, synthetic construct
  source 1..20: mol_type = other RNA
cttttatacaatctgtgttc

SEQ ID NO: 3350 - RNA, 20 nt, synthetic construct
  source 1..20: mol_type = other RNA
gctgggggctggtggggagc

SEQ ID NO: 3351 - RNA, 20 nt, synthetic construct
  source 1..20: mol_type = other RNA
gctgggggctggtggggagc

SEQ ID NO: 3352 - RNA, 20 nt, synthetic construct
  source 1..20: mol_type = other RNA
gctgggggctggtggggagc

SEQ ID NO: 3353 - RNA, 20 nt, synthetic construct
  source 1..20: mol_type = other RNA
gctgggggctggtggggagc

SEQ ID NO: 3354 - RNA, 20 nt, synthetic construct
  source 1..20: mol_type = other RNA
gctgggggctggtggggagc

SEQ ID NO: 3355 - RNA, 20 nt, synthetic construct
  source 1..20: mol_type = other RNA
gctgggggctggtggggagc

SEQ ID NO: 3356 - RNA, 20 nt, synthetic construct
  source 1..20: mol_type = other RNA
gctgggggctggtggggagc

SEQ ID NO: 3357 - RNA, 20 nt, synthetic construct
  source 1..20: mol_type = other RNA
gctgggggctggtggggagc

SEQ ID NO: 3358 - RNA, 20 nt, synthetic construct
  source 1..20: mol_type = other RNA
gctgggggctggtggggagc

SEQ ID NO: 3359 - RNA, 20 nt, synthetic construct
  source 1..20: mol_type = other RNA
gctgggggctggtggggagc

SEQ ID NO: 3360 - RNA, 20 nt, synthetic construct
  source 1..20: mol_type = other RNA
ggctgggggctggtggggag

SEQ ID NO: 3361 - RNA, 20 nt, synthetic construct
  source 1..20: mol_type = other RNA
ggctgggggctggtggggag

SEQ ID NO: 3362 - RNA, 20 nt, synthetic construct
  source 1..20: mol_type = other RNA
ggctgggggctggtggggag

SEQ ID NO: 3363 - RNA, 20 nt, synthetic construct
  source 1..20: mol_type = other RNA
taaaaggctgggggctggtg

SEQ ID NO: 3364 - RNA, 20 nt, synthetic construct
  source 1..20: mol_type = other RNA
taaaaggctgggggctggtg

SEQ ID NO: 3365 - RNA, 20 nt, synthetic construct
  source 1..20: mol_type = other RNA
taaaaggctgggggctggtg

SEQ ID NO: 3366 - RNA, 20 nt, synthetic construct
  source 1..20: mol_type = other RNA
taaaaggctgggggctggtg

SEQ ID NO: 3367 - RNA, 20 nt, synthetic construct
  source 1..20: mol_type = other RNA
taaaaggctgggggctggtg

SEQ ID NO: 3368 - RNA, 20 nt, synthetic construct
  source 1..20: mol_type = other RNA
taaaaggctgggggctggtg

SEQ ID NO: 3369 - RNA, 20 nt, synthetic construct
  source 1..20: mol_type = other RNA
taaaaggctgggggctggtg

SEQ ID NO: 3370 - RNA, 20 nt, synthetic construct
  source 1..20: mol_type = other RNA
taaaaggctgggggctggtg

SEQ ID NO: 3371 - RNA, 20 nt, synthetic construct
  source 1..20: mol_type = other RNA
taaaaggctgggggctggtg

SEQ ID NO: 3372 - RNA, 20 nt, synthetic construct
  source 1..20: mol_type = other RNA
taaaaggctgggggctggtg

SEQ ID NO: 3373 - RNA, 20 nt, synthetic construct
  source 1..20: mol_type = other RNA
tataaaaggctgggggctgg

SEQ ID NO: 3374 - RNA, 20 nt, synthetic construct
  source 1..20: mol_type = other RNA
tataaaaggctgggggctgg

SEQ ID NO: 3375 - RNA, 20 nt, synthetic construct
  source 1..20: mol_type = other RNA
tataaaaggctgggggctgg

SEQ ID NO: 3376 - RNA, 20 nt, synthetic construct
  source 1..20: mol_type = other RNA
tataaaaggctgggggctgg

SEQ ID NO: 3377 - RNA, 20 nt, synthetic construct
  source 1..20: mol_type = other RNA
tataaaaggctgggggctgg

SEQ ID NO: 3378 - RNA, 20 nt, synthetic construct
  source 1..20: mol_type = other RNA
tataaaaggctgggggctgg

SEQ ID NO: 3379 - RNA, 20 nt, synthetic construct
  source 1..20: mol_type = other RNA
tataaaaggctgggggctgg

SEQ ID NO: 3380 - RNA, 20 nt, synthetic construct
  source 1..20: mol_type = other RNA
tataaaaggctgggggctgg

SEQ ID NO: 3381 - RNA, 20 nt, synthetic construct
  source 1..20: mol_type = other RNA
tataaaaggctgggggctgg

SEQ ID NO: 3382 - RNA, 20 nt, synthetic construct
  source 1..20: mol_type = other RNA
tataaaaggctgggggctgg

SEQ ID NO: 3383 - RNA, 22 nt, synthetic construct
  source 1..22: mol_type = other RNA
tataaaaggctgggggctggtg

SEQ ID NO: 3384 - RNA, 22 nt, synthetic construct
  source 1..22: mol_type = other RNA
tatacaatctgtgttctggcac

SEQ ID NO: 3385 - RNA, 20 nt, synthetic construct
  source 1..20: mol_type = other RNA
tgggggctggtggggagcag

SEQ ID NO: 3386 - RNA, 20 nt, synthetic construct
  source 1..20: mol_type = other RNA
tgggggctggtggggagcag

SEQ ID NO: 3387 - RNA, 20 nt, synthetic construct
  source 1..20: mol_type = other RNA
tgggggctggtggggagcag

SEQ ID NO: 3388 - RNA, 20 nt, synthetic construct
  source 1..20: mol_type = other RNA
tgggggctggtggggagcag

SEQ ID NO: 3389 - RNA, 20 nt, synthetic construct
  source 1..20: mol_type = other RNA
tgggggctggtggggagcag

SEQ ID NO: 3390 - RNA, 20 nt, synthetic construct
  source 1..20: mol_type = other RNA
tgggggctggtggggagcag

SEQ ID NO: 3391 - RNA, 20 nt, synthetic construct
  source 1..20: mol_type = other RNA
tgggggctggtggggagcag

SEQ ID NO: 3392 - RNA, 20 nt, synthetic construct
  source 1..20: mol_type = other RNA
tgggggctggtggggagcag

SEQ ID NO: 3393 - RNA, 20 nt, synthetic construct
  source 1..20: mol_type = other RNA
tgtataaaaggctgggggct

SEQ ID NO: 3394 - RNA, 20 nt, synthetic construct
  source 1..20: mol_type = other RNA
tgtataaaaggctgggggct

SEQ ID NO: 3395 - RNA, 20 nt, synthetic construct
  source 1..20: mol_type = other RNA
tgtataaaaggctgggggct

SEQ ID NO: 3396 - RNA, 20 nt, synthetic construct
  source 1..20: mol_type = other RNA
tgtataaaaggctgggggct

SEQ ID NO: 3397 - RNA, 20 nt, synthetic construct
  source 1..20: mol_type = other RNA
tgtataaaaggctgggggct

SEQ ID NO: 3398 - RNA, 20 nt, synthetic construct
  source 1..20: mol_type = other RNA
ttatacaatctgtgttctgg

SEQ ID NO: 3399 - RNA, 20 nt, synthetic construct
  source 1..20: mol_type = other RNA
ttatacaatctgtgttctgg

SEQ ID NO: 3400 - RNA, 20 nt, synthetic construct
  source 1..20: mol_type = other RNA
ttatacaatctgtgttctgg

SEQ ID NO: 3401 - RNA, 20 nt, synthetic construct
  source 1..20: mol_type = other RNA
ttatacaatctgtgttctgg

SEQ ID NO: 3402 - RNA, 20 nt, synthetic construct
  source 1..20: mol_type = other RNA
ttatacaatctgtgttctgg

SEQ ID NO: 3403 - RNA, 20 nt, synthetic construct
  source 1..20: mol_type = other RNA
ttgtataaaaggctgggggc

SEQ ID NO: 3404 - RNA, 20 nt, synthetic construct
  source 1..20: mol_type = other RNA
ttgtataaaaggctgggggc

SEQ ID NO: 3405 - RNA, 20 nt, synthetic construct
  source 1..20: mol_type = other RNA
ttgtataaaaggctgggggc

SEQ ID NO: 3406 - RNA, 20 nt, synthetic construct
  source 1..20: mol_type = other RNA
ttgtataaaaggctgggggc

SEQ ID NO: 3407 - RNA, 20 nt, synthetic construct
  source 1..20: mol_type = other RNA
ttgtataaaaggctgggggc

SEQ ID NO: 3408 - RNA, 20 nt, synthetic construct
  source 1..20: mol_type = other RNA
ttgtataaaaggctgggggc

SEQ ID NO: 3409 - RNA, 20 nt, synthetic construct
  source 1..20: mol_type = other RNA
ttgtataaaaggctgggggc

SEQ ID NO: 3410 - RNA, 20 nt, synthetic construct
  source 1..20: mol_type = other RNA
ttgtataaaaggctgggggc

SEQ ID NO: 3411 - RNA, 20 nt, synthetic construct
  source 1..20: mol_type = other RNA
ttgtataaaaggctgggggc

SEQ ID NO: 3412 - RNA, 20 nt, synthetic construct
  source 1..20: mol_type = other RNA
ttgtataaaaggctgggggc

SEQ ID NO: 3413 - RNA, 20 nt, synthetic construct
  source 1..20: mol_type = other RNA
ttgtataaaaggctgggggc

SEQ ID NO: 3414 - RNA, 20 nt, synthetic construct
  source 1..20: mol_type = other RNA
ttgtataaaaggctgggggc

SEQ ID NO: 3415 - RNA, 20 nt, synthetic construct
  source 1..20: mol_type = other RNA
ttttatacaatctgtgttct

SEQ ID NO: 3416 - RNA, 20 nt, synthetic construct
  source 1..20: mol_type = other RNA
ttttatacaatctgtgttct

SEQ ID NO: 3417 - RNA, 20 nt, synthetic construct
  source 1..20: mol_type = other RNA
ttttatacaatctgtgttct

SEQ ID NO: 3418 - RNA, 20 nt, synthetic construct
  source 1..20: mol_type = other RNA
ttttatacaatctgtgttct

SEQ ID NO: 3419 - RNA, 20 nt, synthetic construct
  source 1..20: mol_type = other RNA
ttttatacaatctgtgttct

SEQ ID NO: 3420 - RNA, 20 nt, synthetic construct
  source 1..20: mol_type = other RNA
ttttatacaatctgtgttct

SEQ ID NO: 3421 - RNA, 20 nt, synthetic construct
  source 1..20: mol_type = other RNA
ttttatacaatctgtgttct

SEQ ID NO: 3422 - RNA, 20 nt, synthetic construct
  source 1..20: mol_type = other RNA
ttttatacaatctgtgttct

SEQ ID NO: 3423 - RNA, 20 nt, synthetic construct
  source 1..20: mol_type = other RNA
ttttatacaatctgtgttct

SEQ ID NO: 3424 - RNA, 20 nt, synthetic construct
  source 1..20: mol_type = other RNA
ttttatacaatctgtgttct

SEQ ID NO: 3425 - RNA, 20 nt, synthetic construct
  source 1..20: mol_type = other RNA
aacgccatggggagcaatct

SEQ ID NO: 3426 - RNA, 20 nt, synthetic construct
  source 1..20: mol_type = other RNA
aacgccatggggagcaatct

SEQ ID NO: 3427 - RNA, 20 nt, synthetic construct
  source 1..20: mol_type = other RNA
acgccatggggagcaatctc

SEQ ID NO: 3428 - RNA, 20 nt, synthetic construct
  source 1..20: mol_type = other RNA
acgccatggggagcaatctc

SEQ ID NO: 3429 - RNA, 20 nt, synthetic construct
  source 1..20: mol_type = other RNA
acgccatggggagcaatctc

SEQ ID NO: 3430 - RNA, 20 nt, synthetic construct
  source 1..20: mol_type = other RNA
acgccatggggagcaatctc

SEQ ID NO: 3431 - RNA, 20 nt, synthetic construct
  source 1..20: mol_type = other RNA
acgccatggggagcaatctc

SEQ ID NO: 3432 - RNA, 20 nt, synthetic construct
  source 1..20: mol_type = other RNA
acgccatggggagcaatctc

SEQ ID NO: 3433 - RNA, 20 nt, synthetic construct
  source 1..20: mol_type = other RNA
agattgctccccatggcgtt

SEQ ID NO: 3434 - RNA, 22 nt, synthetic construct
  source 1..22: mol_type = other RNA
caacgccatggggagcaatctc

SEQ ID NO: 3435 - RNA, 20 nt, synthetic construct
  source 1..20: mol_type = other RNA
ccatggcgttggaaggcagg

SEQ ID NO: 3436 - RNA, 20 nt, synthetic construct
  source 1..20: mol_type = other RNA
ccatggcgttggaaggcagg

SEQ ID NO: 3437 - RNA, 20 nt, synthetic construct
  source 1..20: mol_type = other RNA
ccatggcgttggaaggcagg

SEQ ID NO: 3438 - RNA, 20 nt, synthetic construct
  source 1..20: mol_type = other RNA
ccatggcgttggaaggcagg

SEQ ID NO: 3439 - RNA, 20 nt, synthetic construct
  source 1..20: mol_type = other RNA
cccatggcgttggaaggcag

SEQ ID NO: 3440 - RNA, 20 nt, synthetic construct
  source 1..20: mol_type = other RNA
cccatggcgttggaaggcag

SEQ ID NO: 3441 - RNA, 20 nt, synthetic construct
  source 1..20: mol_type = other RNA
cccatggcgttggaaggcag

SEQ ID NO: 3442 - RNA, 20 nt, synthetic construct
  source 1..20: mol_type = other RNA
cccatggcgttggaaggcag

SEQ ID NO: 3443 - RNA, 20 nt, synthetic construct
  source 1..20: mol_type = other RNA
ccccatggcgttggaaggca

SEQ ID NO: 3444 - RNA, 20 nt, synthetic construct
  source 1..20: mol_type = other RNA
ccccatggcgttggaaggca

SEQ ID NO: 3445 - RNA, 20 nt, synthetic construct
  source 1..20: mol_type = other RNA
ccccatggcgttggaaggca

SEQ ID NO: 3446 - RNA, 20 nt, synthetic construct
  source 1..20: mol_type = other RNA
ccccatggcgttggaaggca

SEQ ID NO: 3447 - RNA, 20 nt, synthetic construct
  source 1..20: mol_type = other RNA
ccccatggcgttggaaggca

SEQ ID NO: 3448 - RNA, 20 nt, synthetic construct
  source 1..20: mol_type = other RNA
ccccatggcgttggaaggca

SEQ ID NO: 3449 - RNA, 20 nt, synthetic construct
  source 1..20: mol_type = other RNA
ccccatggcgttggaaggca

SEQ ID NO: 3450 - RNA, 20 nt, synthetic construct
  source 1..20: mol_type = other RNA
ccccatggcgttggaaggca

SEQ ID NO: 3451 - RNA, 20 nt, synthetic construct
  source 1..20: mol_type = other RNA
ctccccatggcgttggaagg

SEQ ID NO: 3452 - RNA, 20 nt, synthetic construct
  source 1..20: mol_type = other RNA
ctccccatggcgttggaagg

SEQ ID NO: 3453 - RNA, 20 nt, synthetic construct
  source 1..20: mol_type = other RNA
ctccccatggcgttggaagg

SEQ ID NO: 3454 - RNA, 22 nt, synthetic construct
  source 1..22: mol_type = other RNA
ctccccatggcgttggaaggca

SEQ ID NO: 3455 - RNA, 20 nt, synthetic construct
  source 1..20: mol_type = other RNA
gagattgctccccatggcgt

SEQ ID NO: 3456 - RNA, 20 nt, synthetic construct
  source 1..20: mol_type = other RNA
tccccatggcgttggaaggc

SEQ ID NO: 3457 - RNA, 20 nt, synthetic construct
  source 1..20: mol_type = other RNA
tccccatggcgttggaaggc

SEQ ID NO: 3458 - RNA, 20 nt, synthetic construct
  source 1..20: mol_type = other RNA
tccccatggcgttggaaggc

SEQ ID NO: 3459 - RNA, 20 nt, synthetic construct
  source 1..20: mol_type = other RNA
tccccatggcgttggaaggc

SEQ ID NO: 3460 - RNA, 20 nt, synthetic construct
  source 1..20: mol_type = other RNA
tccccatggcgttggaaggc

SEQ ID NO: 3461 - RNA, 20 nt, synthetic construct
  source 1..20: mol_type = other RNA
tccccatggcgttggaaggc

SEQ ID NO: 3462 - RNA, 20 nt, synthetic construct
  source 1..20: mol_type = other RNA
tccccatggcgttggaaggc

SEQ ID NO: 3463 - RNA, 20 nt, synthetic construct
  source 1..20: mol_type = other RNA
tccccatggcgttggaaggc

SEQ ID NO: 3464 - RNA, 20 nt, synthetic construct
  source 1..20: mol_type = other RNA
tccccatggcgttggaaggc

SEQ ID NO: 3465 - RNA, 20 nt, synthetic construct
  source 1..20: mol_type = other RNA
tccccatggcgttggaaggc

SEQ ID NO: 3466 - RNA, 20 nt, synthetic construct
  source 1..20: mol_type = other RNA
tccccatggcgttggaaggc

SEQ ID NO: 3467 - RNA, 20 nt, synthetic construct
  source 1..20: mol_type = other RNA
tgctccccatggcgttggaa

SEQ ID NO: 3468 - RNA, 20 nt, synthetic construct
  source 1..20: mol_type = other RNA
tgctccccatggcgttggaa

SEQ ID NO: 3469 - RNA, 20 nt, synthetic construct
  source 1..20: mol_type = other RNA
tgctccccatggcgttggaa

SEQ ID NO: 3470 - RNA, 20 nt, synthetic construct
  source 1..20: mol_type = other RNA
tgctccccatggcgttggaa

SEQ ID NO: 3471 - RNA, 20 nt, synthetic construct
  source 1..20: mol_type = other RNA
tgctccccatggcgttggaa

SEQ ID NO: 3472 - RNA, 20 nt, synthetic construct
  source 1..20: mol_type = other RNA
tgctccccatggcgttggaa

SEQ ID NO: 3473 - RNA, 20 nt, synthetic construct
  source 1..20: mol_type = other RNA
tgctccccatggcgttggaa

SEQ ID NO: 3474 - RNA, 20 nt, synthetic construct
  source 1..20: mol_type = other RNA
tgctccccatggcgttggaa

SEQ ID NO: 3475 - RNA, 20 nt, synthetic construct
  source 1..20: mol_type = other RNA
tgctccccatggcgttggaa

SEQ ID NO: 3476 - RNA, 20 nt, synthetic construct
  source 1..20: mol_type = other RNA
ttgctccccatggcgttgga

SEQ ID NO: 3477 - RNA, 20 nt, synthetic construct
  source 1..20: mol_type = other RNA
ttgctccccatggcgttgga

SEQ ID NO: 3478 - RNA, 20 nt, synthetic construct
  source 1..20: mol_type = other RNA
ttgctccccatggcgttgga

SEQ ID NO: 3479 - RNA, 20 nt, synthetic construct
  source 1..20: mol_type = other RNA
ttgctccccatggcgttgga

SEQ ID NO: 3480 - RNA, 20 nt, synthetic construct
  source 1..20: mol_type = other RNA
ttgctccccatggcgttgga

SEQ ID NO: 3481 - RNA, 20 nt, synthetic construct
  source 1..20: mol_type = other RNA
ttgctccccatggcgttgga

SEQ ID NO: 3482 - RNA, 20 nt, synthetic construct
  source 1..20: mol_type = other RNA
ttgctccccatggcgttgga

SEQ ID NO: 3483 - DNA, 23 bp, synthetic construct
  source 1..23: mol_type = other DNA
cagaacacagattgtataaaagg

SEQ ID NO: 3484 - DNA, 23 bp, synthetic construct
  source 1..23: mol_type = other DNA
acacagattgtataaaaggctgg

SEQ ID NO: 3485 - DNA, 23 bp, synthetic construct
  source 1..23: mol_type = other DNA
cacagattgtataaaaggctggg

SEQ ID NO: 3486 - DNA, 23 bp, synthetic construct
  source 1..23: mol_type = other DNA
acagattgtataaaaggctgggg

SEQ ID NO: 3487 - DNA, 23 bp, synthetic construct
  source 1..23: mol_type = other DNA
cagattgtataaaaggctggggg

SEQ ID NO: 3488 - DNA, 23 bp, synthetic construct
  source 1..23: mol_type = other DNA
tataaaaggctgggggctggtgg

SEQ ID NO: 3489 - DNA, 23 bp, synthetic construct
  source 1..23: mol_type = other DNA
ataaaaggctgggggctggtggg

SEQ ID NO: 3490 - DNA, 23 bp, synthetic construct
  source 1..23: mol_type = other DNA
taaaaggctgggggctggtgggg

SEQ ID NO: 3491 - DNA, 23 bp, synthetic construct
  source 1..23: mol_type = other DNA
cttttatacaatctgtgttctgg

SEQ ID NO: 3492 - DNA, 23 bp, synthetic construct
  source 1..23: mol_type = other DNA
aatctgtgttctggcacctgcgg

SEQ ID NO: 3493 - DNA, 23 bp, synthetic construct
  source 1..23: mol_type = other DNA
aaaaggctgggggctggtgggga

SEQ ID NO: 3494 - DNA, 23 bp, synthetic construct
  source 1..23: mol_type = other DNA
agaacacagattgtataaaaggc

SEQ ID NO: 3495 - DNA, 23 bp, synthetic construct
  source 1..23: mol_type = other DNA
atctgtgttctggcacctgcggc

SEQ ID NO: 3496 - DNA, 27 bp, synthetic construct
  source 1..27: mol_type = other DNA
agattgtataaaaggctgggggctggt

SEQ ID NO: 3497 - DNA, 27 bp, synthetic construct
  source 1..27: mol_type = other DNA
ccaccagcccccagccttttatacaat

SEQ ID NO: 3498 - DNA, 23 bp, synthetic construct
  source 1..23: mol_type = other DNA
tgctccccatggcgttggaaggc

SEQ ID NO: 3499 - DNA, 23 bp, synthetic construct
  source 1..23: mol_type = other DNA
ttgctccccatggcgttggaagg

SEQ ID NO: 3500 - DNA, 23 bp, synthetic construct
  source 1..23: mol_type = other DNA
gagattgctccccatggcgttgg

SEQ ID NO: 3501 - DNA, 23 bp, synthetic construct
  source 1..23: mol_type = other DNA
ccccatggcgttggaaggcagga

SEQ ID NO: 3502 - DNA, 23 bp, synthetic construct
  source 1..23: mol_type = other DNA
ccatggcgttggaaggcaggaga

SEQ ID NO: 3503 - DNA, 23 bp, synthetic construct
  source 1..23: mol_type = other DNA
agattgctccccatggcgttgga

SEQ ID NO: 3504 - RNA, 20 nt, synthetic construct
  source 1..20: mol_type = other RNA
cagaacacagattgtataaa

SEQ ID NO: 3505 - RNA, 20 nt, synthetic construct
  source 1..20: mol_type = other RNA
acacagattgtataaaaggc

SEQ ID NO: 3506 - RNA, 20 nt, synthetic construct
  source 1..20: mol_type = other RNA
cacagattgtataaaaggct

SEQ ID NO: 3507 - RNA, 20 nt, synthetic construct
  source 1..20: mol_type = other RNA
acagattgtataaaaggctg

SEQ ID NO: 3508 - RNA, 20 nt, synthetic construct
  source 1..20: mol_type = other RNA
cagattgtataaaaggctgg

SEQ ID NO: 3509 - RNA, 20 nt, synthetic construct
  source 1..20: mol_type = other RNA
tataaaaggctgggggctgg

SEQ ID NO: 3510 - RNA, 20 nt, synthetic construct
  source 1..20: mol_type = other RNA
ataaaaggctgggggctggt

SEQ ID NO: 3511 - RNA, 20 nt, synthetic construct
  source 1..20: mol_type = other RNA
taaaaggctgggggctggtg

SEQ ID NO: 3512 - RNA, 20 nt, synthetic construct
  source 1..20: mol_type = other RNA
cttttatacaatctgtgttc

SEQ ID NO: 3513 - RNA, 20 nt, synthetic construct
  source 1..20: mol_type = other RNA
aatctgtgttctggcacctg

SEQ ID NO: 3514 - RNA, 20 nt, synthetic construct
  source 1..20: mol_type = other RNA
aaaaggctgggggctggtgg

SEQ ID NO: 3515 - RNA, 20 nt, synthetic construct
  source 1..20: mol_type = other RNA
agaacacagattgtataaaa

SEQ ID NO: 3516 - RNA, 20 nt, synthetic construct
  source 1..20: mol_type = other RNA
atctgtgttctggcacctgc

SEQ ID NO: 3517 - RNA, 21 nt, synthetic construct
  source 1..21: mol_type = other RNA
agattgtataaaaggctgggg

SEQ ID NO: 3518 - RNA, 21 nt, synthetic construct
  source 1..21: mol_type = other RNA
ccaccagcccccagcctttta

SEQ ID NO: 3519 - RNA, 20 nt, synthetic construct
  source 1..20: mol_type = other RNA
tgctccccatggcgttggaa

SEQ ID NO: 3520 - RNA, 20 nt, synthetic construct
  source 1..20: mol_type = other RNA
ttgctccccatggcgttgga

SEQ ID NO: 3521 - RNA, 20 nt, synthetic construct
  source 1..20: mol_type = other RNA
gagattgctccccatggcgt

SEQ ID NO: 3522 - RNA, 20 nt, synthetic construct
  source 1..20: mol_type = other RNA
ccccatggcgttggaaggca

SEQ ID NO: 3523 - RNA, 20 nt, synthetic construct
  source 1..20: mol_type = other RNA
ccatggcgttggaaggcagg

SEQ ID NO: 3524 - RNA, 20 nt, synthetic construct
  source 1..20: mol_type = other RNA
agattgctccccatggcgtt

SEQ ID NO: 3525 - RNA, 20 nt, synthetic construct
  source 1..20: mol_type = other RNA
cctcagatgtctatgtgttt

SEQ ID NO: 3526 - RNA, 20 nt, synthetic construct
  source 1..20: mol_type = other RNA
tctcacctctgcaagtattg

SEQ ID NO: 3527 - RNA, 20 nt, synthetic construct
  source 1..20: mol_type = other RNA
gcttacaatgactgagatct

SEQ ID NO: 3528 - RNA, 21 nt, synthetic construct
  source 1..21: mol_type = other RNA
tgcttacaatgactgagatct

SEQ ID NO: 3529 - DNA, 23 bp, synthetic construct
  source 1..23: mol_type = other DNA
cctcagatgtctatgtgtttggg

SEQ ID NO: 3530 - DNA, 23 bp, synthetic construct
  source 1..23: mol_type = other DNA
tctcacctctgcaagtattgggg

SEQ ID NO: 3531 - protein, 7 aa, synthetic construct
RSVGSVY

SEQ ID NO: 3532 - protein, 7 aa, synthetic construct
KTVGTVY

SEQ ID NO: 3533 - protein, 7 aa, synthetic construct
RYLGDAS

SEQ ID NO: 3534 - protein, 7 aa, synthetic construct
WVLPSGG

SEQ ID NO: 3535 - protein, 7 aa, synthetic construct
VTVGSIY

SEQ ID NO: 3536 - protein, 7 aa, synthetic construct
VRGSSIL

SEQ ID NO: 3537 - protein, 7 aa, synthetic construct
REQQKLW

SEQ ID NO: 3538 - protein, 7 aa, synthetic construct
ASNPGRW

SEQ ID NO: 3539 - protein, 7 aa, synthetic construct
SLDKPFK

SEQ ID NO: 3540 - protein, 7 aa, synthetic construct
TLAVPFK

SEQ ID NO: 3541 - protein, 7 aa, synthetic construct
WTLESGH

SEQ ID NO: 3542 - protein, 7 aa, synthetic construct
REQKKLW

SEQ ID NO: 3543 - protein, 7 aa, synthetic construct
PTQGTVR

SEQ ID NO: 3544 - protein, 7 aa, synthetic construct
PTQGTFR

SEQ ID NO: 3545 - protein, 7 aa, synthetic construct
PSQGTLR

SEQ ID NO: 3546 - protein, 7 aa, synthetic construct
NLGAALS

SEQ ID NO: 3547 - protein, 7 aa, synthetic construct
PKPSHGE

SEQ ID NO: 3548 - protein, 7 aa, synthetic construct
PTPGTLR

SEQ ID NO: 3549 - protein, 7 aa, synthetic construct
PTQGTLR

SEQ ID NO: 3550 - protein, 7 aa, synthetic construct
QDGPAVK

SEQ ID NO: 3551 - protein, 7 aa, synthetic construct
PNQGTLR

SEQ ID NO: 3552 - protein, 7 aa, synthetic construct
ESLAGVR

SEQ ID NO: 3553 - protein, 7 aa, synthetic construct
TDALTTK

SEQ ID NO: 3554 - protein, 7 aa, synthetic construct
TDAGDGK

SEQ ID NO: 3555 - protein, 7 aa, synthetic construct
MTGISIV

SEQ ID NO: 3556 - protein, 7 aa, synthetic construct
NGYTEGR

SEQ ID NO: 3557 - protein, 7 aa, synthetic construct
SLVTSST

SEQ ID NO: 3558 - protein, 7 aa, synthetic construct
PTQGTIR

SEQ ID NO: 3559 - protein, 736 aa, Dependoparvovirus sp.
  source 1..736: note = serotype AAV9
MAADGYLPDWLEDNLSEGIREWWALKPGAPQPKANQQHQDNARGLVLPGYKYLGPGNGLDKGEPVNAADAAALEHDKAYDQQLKAGDNPYLKYNHADAEFQERLKEDTSFGGNLGRAVFQAKKRLLEPLGLVEEAAKTAPGKKRPVEQSPQEPDSSAGIGKSGAQPAKKRLNFGQTGDTESVPDPQPIGEPPAAPSGVGSLTMASGGGAPVADNNEGADGVGSSSGNWHCDSQWLGDRVITTSTRTWALPTYNNHLYKQISNSTSGGSSNDNAYFGYSTPWGYFDFNRFHCHFSPRDWQRLINNNWGFRPKRLNFKLFNIQVKEVTDNNGVKTIANNLTSTVQVFTDSDYQLPYVLGSAHEGCLPPFPADVFMIPQYGYLTLNDGSQAVGRSSFYCLEYFPSQMLRTGNNFQFSYEFENVPFHSSYAHSQSLDRLMNPLIDQYLYYLSKTINGSGQNQQTLKFSVAGPSNMAVQGRNYIPGPSYRQQRVSTTVTQNNNSEFAWPGASSWALNGRNSLMNPGPAMASHKEGEDRFFPLSGSLIFGKQGTGRDNVDADKVMITNEEEIKTTNPVATESYGQVATNHQSAQAQAQTGWVQNQGILPGMVWQDRDVYLQGPIWAKIPHTDGNFHPSPLMGGFGMKHPPPQILIKNTPVPADPPTAFNKDKLNSFITQYSTGQVSVEIEWELQKENSKRWNPEIQYTSNYYKSNNVEFAVNTEGVYSEPRPIGTRYLTRNL

SEQ ID NO: 3560 - protein, 98 aa, synthetic construct
CLSYDTEILTVEYGLIPIGEIVEKKIECTVYTIDNNGLIYTQSIEQWHHRGYQELFEYILEDGSTIRATKDHKFMTSERQMLPIEEIFERGWELKQVL

SEQ ID NO: 3561 - protein, 99 aa, synthetic construct
CLSSDTEVITEEYGPIAIGKIVDEGIRCSVYSVDNNGNLYTQPISQWHDRGRQEIYEYYLENGSVIRATKDHKFMTKDGEMLPIDEIFEKGLELKQVLP

SEQ ID NO: 3562 - protein, 99 aa, synthetic construct
CLSYETEVLTVEYGFMPIGKIVEERIRCSVYTVDKNGFIYSQPIAQWHQRGLQEVYEYDLENGSIIRATKEHQFMTNDGQMLAIHEIFTRKLDLLQSQE

SEQ ID NO: 3563 - protein, 35 aa, synthetic construct
MKVISRKSLGTQPVYDICVTHDHNFLMKNGLIASN

SEQ ID NO: 3564 - protein, 36 aa, synthetic construct
MDVKIVSYKFLGSENVYDILERDHNFLIKNGLVASN

SEQ ID NO: 3565 - protein, 36 aa, synthetic construct
MVKIITYKSLGRQKVYDLGLEQDHNFVLANGLVASN

SEQ ID NO: 3566 - protein, 36 aa, synthetic construct
MVKIISRKYLDTQPVYDVGVQKDHNFLISNGSIASN

SEQ ID NO: 3567 - protein, 36 aa, synthetic construct
MVKIATRRSLGTEPVYDIGLQQEHNFLLANGLVASN

SEQ ID NO: 3568 - protein, 1380 aa, synthetic construct
MKKPYSIGLDIGTNSVGWAVITDDYKVPAKKMKVLGNTDRSHIKKNLIGALLFDAGNTAEDRRLKRTARRRYTRRRNRILYLQEIFAEEMNKIDESFFHRLDDSFLVPEDKRGSKYPIFATLQEEKEYHKQFPTIYHLRKQLAESNEKADLRLVYLALAHMIKYRGHFLIDDPKFKVQNNDIQGLFEKFVEEYDNVQETSLSKIKLNVTEILTAKIPKSEKQEQLLKNYPSEKKNTLFGNLIGLALGLTPNFKTNFSLENDAKLQISSESYEEDLGSLLALIGENFIELFSAVKNLSDGILLAGIVSDESPHAPLSTKMVIRFKEHEEDLAALKHFIKANLPEKYDEVFSDDSKNGYAGYVGVDSKVRKRNGKLATEEEFYKYLKDILNNVKGADYFLEKIKREDLLRKQRTFDNGTIPYQVHLEEMKAILQNQGEYYPFLKENKEKIQQILTFRIPYYVGPLARGNRDFAWLTRNSDQAIRPWNFEEVVDKASSAEDFINKMTNYDLYLPEEKVLPKHSLLYETFAVYNELTKVKFIAEGLRDYQFLDSGQKKQIVNQLFKEKRKVTEKDIIHYLHNVDGYDGIELKGIEKQFNASLSTYHDLLKIIKDKEFMDDPKNEEILENIVHTLTIFEDREMIKQRLAQYDSLFDEKVIKALTRRHYTGWGKLSAKLINGICDKQTNKTILDFLIDDDKINRNFMQLINDDGLSFKDIIQKAQVVGKIDDVKQVVQELPGSPAIKKGILQSIKIVDELVKVMGHAPESIVIEMARENQTTARGKKNSQQRYKRIEDALKNLAPGLDSNILKENPTDNIQLQNDRLFLYYLQNGKDMYTGEALDINQLSNYDIDHIVPQAFIKDDSLDNRVLTSSKDNRGKSDNVPSIEVVQKRKAFWQQLLDSKLISERKFNNLTKAERGGLDERDKVGFIKRQLVETRQITKHVAQILDARFNTEVNEKNQKIRKVKIITLKSNLVSNFRKEFGLYKVREINDYHHAHDAYLNAVVAKAILKKYPKLEPEFVYGDYQKYDLKRYISRSKDPKEIEKATEKYFFYSNLLNFFKEEVHYADGTIIKRENIEYSKDTGEIAWNKEKDFATVRKVLSCPQVNIVKKTEVQTGGFSKESILPKRNSDKLIARKKDWDPKKYGGFDSPTVAYSVLVVAKVEKGKSKKLKSVKELVGITIMERSSFEKDPVDFLEAKGYKEVRKDLIIKLPKYSLFELENGRKRMLASAGELQKGNELALPSKYVNFLYLASHYEKLKGSPEDNEQKQLFVEQHKHYLDEIIEQISEFSKRVILADANLDKVLSAYNKHRDKPIREQAENIIHLFTLTNLGAPAAFKYFDTTIDRKRYTSTKEVLDATLIHQSITGLYETRIDLSQLGGD

SEQ ID NO: 3569 - DNA, 4140 bp, synthetic construct
  source 1..4140: mol_type = other DNA
atgaagaagccttattccatcggcttggacatcgggactaactccgtcggatgggctgtgattaccgacgactacaaggttcccgcaaaaaagatgaaagtgctcggcaatacagatcggtcacatattaagaagaacctgattggcgctctgcttttcgatgcaggtaatactgccgaggataggcgcctcaagagaacagcccggcgtagatacactcgcagaaggaaccggattctgtacctgcaagaaatttttgctgaagaaatgaataagatcgatgagtcattcttccaccgactggacgatagtttcctggtacctgaagacaaaaggggatccaagtaccccatttttgccacactccaagaagagaaggagtaccacaagcaatttccgaccatctaccaccttaggaagcagctggcagagtccaacgaaaaggcagacttgcggttagtctacctggctcttgcacacatgataaagtaccggggacatttcttaattgacgaccctaagtttaaagttcagaataacgatattcaaggcctcttcgaaaagtttgttgaggaatatgataacgtacaagaaacctctttgtctaaaattaagctcaatgtgactgagatcctcacagcaaagattcccaaaagcgagaaacaagagcaactcctgaagaactaccctagtgagaaaaagaacaccctttttggcaatctgatcgggctcgccctgggcctgacacctaacttcaaaacaaatttctccctggagaacgacgccaagctgcaaatctcatccgagagttacgaggaagacttaggatctctcctcgcactgattggagaaaacttcattgaactcttctccgccgtgaaaaatctgagtgacggcatccttctggccggaatcgtctctgacgagagtccccacgcgccgctgagcacaaagatggtcatccggttcaaagagcacgaagaagatctcgcggcactcaaacatttcatcaaagccaacttgccagaaaaatacgatgaagtattctccgacgatagcaaaaacggctatgcgggatacgtaggagtcgacagcaaggtgcggaagcgcaatggtaagcttgctacagaagaagaattttacaagtaccttaaagatatcctcaataatgttaagggggccgactacttcctcgaaaagatcaaaagggaggacctgttgaggaaacagcgtacctttgacaacggcacaatcccgtaccaggtgcacctcgaagaaatgaaagccattctgcagaaccagggggaatactatccattcctcaaggaaaacaaggaaaaaatccagcagatccttacgtttaggattccttactatgtgggccctttggcaaggggtaaccgggatttcgcttggctcaccaggaatagtgaccaggccataaggccctggaactttgaagaagtcgtcgacaaggcctcttccgccgaagacttcattaacaaaatgactaactacgatctctacctgccagaggaaaaagtccttccaaaacatagcctgctttacgaaaccttcgccgtatacaacgagcttacaaaagtcaagttcatcgcagagggtctcagggattaccaattccttgactctggccaaaaaaagcagatcgtgaatcaacttttcaaggagaaacgaaaggtgactgaaaaggacatcattcactacctgcacaacgtcgatggatacgacgggattgaactgaagggcatagaaaagcagttcaatgctagtttgtccacgtaccacgatctgcttaaaatcattaaggataaggaattcatggatgaccctaagaacgaagagattttggaaaacatcgtccacaccctgaccattttcgaggatagggagatgataaagcaacggctggcacagtacgactcactttttgacgagaaggtgataaaagcccttacaagaaggcattataccgggtggggcaagctctccgctaagctgatcaatggtatttgcgacaagcagaccaataagactattttggacttcctgattgacgatgataagataaaccgaaactttatgcagctgattaatgatgatggactgagctttaaagatatcattcagaaggcccaggtcgtcggcaagatcgacgacgtcaaacaggtggtgcaggaacttccaggatccccggccattaagaagggaatattacagtccatcaaaattgtggatgagctggtgaaagtcatgggacatgcacctgagtctatcgtcatagagatggctcgtgaaaaccagacgacagcccgaggaaagaagaacagccaacaacggtataaacggatcgaggatgcacttaagaatctggccccggggctggattctaatatcttaaaagaaaatccaaccgataatattcaacttcagaacgaccggctttttctgtattaccttcagaatggaaaagatatgtataccggagaagccctggatataaatcagctgagtaactatgatatcgaccacattgtgcctcaggctttcattaaggatgacagcctggacaatcgcgtactcacatcctccaaggacaacagaggcaagagcgataacgtccctagcatcgaagtggtacaaaagcgtaaggccttctggcagcagctcttagactctaaattgataagcgaacggaaattcaataacctcacaaaggccgagcgtggtggcttggacgagagagacaaggtgggcttcattaaacggcagctcgtggaaaccagacagataaccaagcacgttgcccagatcctcgatgccaggttcaacaccgaagttaacgagaaaaaccaaaagattcggaaagtgaagatcatcactctcaagtctaatttggtgtccaactttagaaaagagtttggactctataaggtccgagagattaatgattatcaccacgctcacgatgcctacctcaacgcagtggtggccaaggccatcctgaaaaaatatcctaagctcgagcctgagttcgtctatggtgactatcagaagtacgacctcaagcgctatattagtaggagcaaggatcctaaagagatcgaaaaggccacagaaaagtacttcttttacagcaacttactcaacttcttcaaagaagaagtccactacgctgatggcaccatcatcaagcgagaaaatatagagtacagtaaggacacaggcgaaatcgcctggaataaagagaaggatttcgctactgtgcgaaaagttctgtcttgcccccaggtgaacattgtgaaaaagactgaggtgcagactggcgggtttagcaaagagagtatcctgccaaagcggaatagcgataagttaattgctcggaaaaaggactgggatccaaagaagtacggcggcttcgattccccaaccgttgcctacagcgtcctcgtcgtcgccaaggtggagaagggtaaaagcaagaagctgaaaagtgtaaaggaactggtcggcattaccattatggagcggagttccttcgaaaaggatccagttgattttttagaagccaaggggtataaggaggtgcgcaaggatttaattattaaactccccaagtacagcctgtttgagctggagaacggaaggaagaggatgctggctagcgccggcgagctccaaaagggcaatgagctcgccctgccaagcaagtacgtgaactttctctatctggctagccactacgagaagctgaagggatcacctgaagacaatgagcagaaacagctgttcgtcgagcagcataaacactacctcgacgaaattattgagcaaattagtgagttctcaaagcgggtaatcctcgcagatgcaaatctggataaagtgttaagcgcgtataataagcaccgggacaaaccaatccgggagcaagccgagaacatcattcatctcttcacactgaccaatcttggggctcctgcagcttttaaatatttcgatacaaccatcgacaggaagcgatatacttctacaaaggaagtgcttgatgcaactctcatccatcaaagcatcacggggctgtatgaaacccggattgacctgagtcagctgggtggggac

SEQ ID NO: 3570 - RNA, 86 nt, synthetic construct
  source 1..86: mol_type = other RNA
gttttagagctgtgttgaaaaacacagcaagttaaaataaggctttgtccgtatccaacttgaaaaagtgagcaccgattcggtgc

SEQ ID NO: 3571 - RNA, 78 nt, synthetic construct
  source 1..78: mol_type = other RNA
gttttagagctggaaacagcaagttaaaataaggctttgtccgtatccaacttgaaaaagtgagcaccgattcggtgc

SEQ ID NO: 3572 - RNA, 76 nt, synthetic construct; identical to SEQ ID NO: 319
  source 1..76: mol_type = other RNA

SEQ ID NO: 3573 - protein, 12 aa, synthetic construct
EGGSEEEEESGS

SEQ ID NO: 3574 - protein, 12 aa, synthetic construct
KGPKPKKEESEK

SEQ ID NO: 3575 - protein, 166 aa, synthetic construct
SEVEFSHEYWMRHALTLAKRARDEREVPVGAVLVLNNRVIGEGWNRAIGLHDPTAHAEIMALRQGGLVMQNYRLIDATLYVTFEPCVMCAGAMIHSRIGRVVFGVRNSKRGAAGSLMNVLNYPGMNHRVEITEGILADECAALLCDFYRMPRQVFNAQKKAQSSIN

SEQ ID NO: 3576 - protein, 166 aa, synthetic construct
SEVEFSHEYWMRHALTLAKRARDEGEVPVGAVLVLNNRVIGEGWNRAIGLYDPTAHAEIMALRQGGLVMQNYRLIDATLYVTFEPCVMCAGAMIHSRIGRVVFGVRNSKRGAAGSLMNVLNYPGMDHRVEITEGILADECAALLCDFYRMPRQVFNAQKKAQSSIN

SEQ ID NO: 3577 - protein, 166 aa, synthetic construct
SEVEFSHEYWMRHALTLAKRARDEGEVPVGAVLVLNNRVIGEGWNRAIGLHDPTAHAEIMALRQGGLVMQNYRLIDATLYVTFEPCVMCAGAMIHSRIGRVVFGVRNSKRGAAGSLMNVLNYPGMDHRVEITEGILADECAALLCDFYRMPRQVFNAQKKAQSSIN

SEQ ID NO: 3578 - protein, 166 aa, synthetic construct
SEVEFSHEYWMRHALTLAKRARDEREVPVGAVLVLNNRVIGEGWNRAIGLHDPTAHAEIMALRQGGLVMQNYGLIDATLYVTFEPCVMCAGAIIHSRIGRVVFGVRNSKRGAAGSLMNVLNYPGMNHRVEITEGILADECAALLCDFYRMPRQVFNAQKKAQSSIN

SEQ ID NO: 3579 - protein, 166 aa, synthetic construct
SEVEFSHEYWMRHALTLAKRARDEREVPVGAVLVLNNRVIGEGWNRAIGLHDPTAHAEIMALRQGGLVMQNYRLIDATLYVTFEPCVMCAGAMIHSRIGRVVFGVRNSKRGAAGSLMNVLNYPGMDHRVEITEGILADECAALLCDFYRMPRQVFNAQKKAQSSIN

SEQ ID NO: 3580 - protein, 166 aa, synthetic construct
SEVEFSHEYWMRHALTLAKRARDEGEVPVGAVLVLNNRVIGEGWNRAIGLYDPTAHAEIMALRQGGLVMQNYGLIDATLYVTFEPCVMCAGAMIHSRIGRVVFGVRNSKRGAAGSLMNVLNYPGMDHRVEITEGILADECAALLCDFYRMPRQVFNAQKKAQSSIN

SEQ ID NO: 3581 - protein, 166 aa, synthetic construct
SEVEFSHEYWMRHALTLAKRARDEGEVPVGAVLVLNNRVIGEGWNRAIGLYDPTAHAEIMALRQGGLVMQNYGLIDATLYSTFEPCVMCAGAMIHSRIGRVVFGVRNSKRGAAGSLMNVLNYPGMDHRVEITEGILADECAALLCDFYRMPRRVFNAQKKAQSSIN

SEQ ID NO: 3582 - protein, 166 aa, synthetic construct
SEVEFSHEYWMRHALTLAKRARDEGEVPVGAVLVLNNRVIGEGWNRAIGLYDPTAHAEIMALRQGGLVMQNYRLIDATLYVTFEPCVMCAGAMIHSRIGRVVFGVRNSKRGAAGSLMNVLNYPGMDHRVEITEGILANECAALLCDFYRMPRQVFNAQKKAQSSIN

SEQ ID NO: 3583 - protein, 166 aa, synthetic construct
SEVEFSHEYWMRHALTLAKRARDEREVPVGAVLVLNNRVIGEGWNRAIGLHDPTAHAEIMALRQGGLVMQNYRLYDATLYSTFEPCVMCAGAMIHSRIGRVVFGVRNAKTGAAGSLMDVLHHPGMNHRVEITEGILADECAALLCRFFRMPRRVFNAQKKAQSSTD

SEQ ID NO: 3584 - protein, 160 aa, Staphylococcus aureus; identical to SEQ ID NO: 309

SEQ ID NO: 3585 - protein, 161 aa, Bacillus subtilis; identical to SEQ ID NO: 310

SEQ ID NO: 3586 - protein, 183 aa, Salmonella enterica; identical to SEQ ID NO: 311
  source 1..183: note = serovar Typhimurium

SEQ ID NO: 3587 - protein, 164 aa, Shewanella putrefaciens; identical to SEQ ID NO: 312

SEQ ID NO: 3588 - protein, 173 aa, Haemophilus influenzae; identical to SEQ ID NO: 313

SEQ ID NO: 3589 - protein, 161 aa, Caulobacter crescentus; identical to SEQ ID NO: 314

SEQ ID NO: 3590 - protein, 178 aa, Geobacter sulfurreducens
MSSLKKTPIRDDAYWMGKAIREAAKAAARDEVPIGAVIVRDGAVIGRGHNLREGSNDPSAHAEMIAIRQAARRSANWRLTGATLYVTLEPCLMCMGAIILARLERVVFGCYDPKGAAGSLYDLSADPRLNHQVRLSPGVCQEECGTMLSDFFRDLRRRKKAKATPALFIDERKVPPEP

SEQ ID NO: 3591 - protein, 171 aa, Streptococcus pyogenes
MPYSLEEQTYFMQEALKEAEKSLQKAEIPIGCVIVKDGEIIGRGHNAREESNQAIMHAEIMAINEANAHEGNWRLLDTTLFVTIEPCVMCSGAIGLARIPHVIYGASNQKFGGADSLYQILTDERLNHRVQVERGLLAADCANIMQTFFRQGRERKKIAKHLIKEQSDPFD

SEQ ID NO: 3592 - protein, 151 aa, Aquifex aeolicus
MGKEYFLKVALREAKRAFEKGEVPVGAIIVKEGEIISKAHNSVEELKDPTAHAEMLAIKEACRRLNTKYLEGCELYVTLEPCIMCSYALVLSRIEKVIFSALDKKHGGVVSVFNILDEPTLNHRVKWEYYPLEEASELLSEFFKKLRNNII

SEQ ID NO: 3593 - protein, 178 aa, Escherichia coli
MRRAFITGVFFLSEVEFSHEYWMRHALTLAKRAWDEREVPVGAVLVHNNRVIGEGWNRPIGRHDPTAHAEIMALRQGGLVMQNYRLIDATLYVTLEPCVMCAGAMIHSRIGRVVFGARDAKTGAAGSLMDVLHHPGMNHRVEITEGILADECAALLSDFFRMRRQEIKAQKKAQSSTD

SEQ ID NO: 3594 - protein, 167 aa, synthetic construct
MSEVEFSHEYWMRHALTLAKRARDEREVPVGAVLVLNNRVIGEGWNRAIGLHDPTAHAEIMALRQGGLVMQNYRLIDATLYVTFEPCVMCAGAMIHSRIGRVVFGVRNSKRGAAGSLMNVLNYPGMNHRVEITEGILADECAALLCDFYRMPRQVFNAQKKAQSSIN

SEQ ID NO: 3595 - protein, 167 aa, synthetic construct
MSEVEFSHEYWMRHALTLAKRARDEGAGPVGAVLVLNNRVIGEGWNRAIGLHDPTAHAEIMALRQGGLVMQNYRLFDATLYVTFEPCVMCAGAMINSRIGRVVFGVRNSKRGAAGSLMNVLNYPGMNHRVEITEGILADECAALLCDFYRMPRQVFNSQKKAQSSIN

SEQ ID NO: 3596 - protein, 167 aa, synthetic construct
MSEVEFSHEYWMRHALTLAKRARDEGAGPVGAVLVLNNRVIGEGWNRAIGLHDPTAHAEIMALRQGGLVMQNYRLFDATLYVTFEPCVMCAGAMINSRIGRVVFGVRNSKRGAAGSLMNVLNYPGMNHRVEITEGILADECAALLCDFYRMPRRVFNSQKKAQSSIN

SEQ ID NO: 3597 - protein, 167 aa, synthetic construct
MSEVEFSHEYWMRHALTLAKRARDEGAGPVGAVLVLNNRVIGEGWNRAIGLHDPTAHAEIMALRQGGLVMQNYRLFDATLYVTFEPCVMCAGAMINSRIGRVVFGVRNSKRGAAGSLMNVLNYPGMNHRVEITEGILADECAALLCDFYRIPRQVFNSQKKAQSSIN

SEQ ID NO: 3598 - protein, 167 aa, synthetic construct
MSEVEFSHEYWMRHALTLAKRARDERKAPVGAVLVLNNRVIGEGWNRAIGLHDPTAHAEIIALRQGGLVMQNYRLIDATLYVTFEPCVMCAGAMINSRIGRVVFGVRNSKRGAAGSLMNVLNYPGMNHRVEITEGILADECAALLCDFYRMPRQVFNAQKKAQSSIN

SEQ ID NO: 3599 - protein, 167 aa, synthetic construct
MSEVEFSHEYWMRHALTLAKRARDERAGPVGAVLVLNNRVIGEGWNRAIGLHDPTAHAEIMALRQGGLVMQNHRLIDATLYVTFEPCVMCAGAMINSRIGRVVFGVRNSKRGAAGSLMNVLNYPGMNHRVEITEGILADECAALLCDFYRMPRHVFNSQKKAQSSIN

SEQ ID NO: 3600 - protein, 167 aa, synthetic construct
MSEVEFSHEYWMRHALTLAKRARDEGEAPVGAVLVLNNRVIGEGWNRRIGLHDPTAHAEIMALRQGGLVMQNSRLIDATLYVTFEPCVMCAGAMINSRIGRVVFGVRNSKRGAAGSLMNVLNYPGMNHRVEITEGILADECAALLCDFYRMPRQVFNAQKKAQSSIN

SEQ ID NO: 3601 - protein, 167 aa, synthetic construct
MSEVEFSHEYWMRHALTLAKRARDEGEGPVGAVLVLNNRVIGEGWNRRIGLHDPTAHAEIMALRQGGLVMQNCRLIDATLYVTFEPCVMCAGAMIHSRIGRVVFGVRNSKRGAAGSLMNVLNYPGMNHRVEITEGILADECAALLCDFYRMPRQVFNAQKKAQSSIN

SEQ ID NO: 3602 - protein, 167 aa, synthetic construct
MSEVEFSHEYWMRHALTLAKRARDEGEAPVGAVLVLNNRVIGEGWIRRIGLHDPTAHAEIMALRQGGLVMQNPRLIDATLYVTFEPCVMCAGAMINSRIGRVVFGVRNSKRGAAGSLMNVLNYPGMNHRVEITEGILADECAALLCDFYRMPRQVFNAQKKAQSSIN

SEQ ID NO: 3603 - protein, 167 aa, synthetic construct
MSEVEFSHEYWMRHALTLAKRARDEGEAPVGAVLVLNNRVIGEGWTRRIGLHDPTAHAEIMALRQGGLVMQNSRLIDATLYVTFEPCVMCAGAMINSRIGRVVFGVRNSKRGAAGSLMNVLNYPGMNHRVEITEGILADECAALLCDFYRMPRHVFNAQKKAQSSIN

SEQ ID NO: 3604 - protein, 167 aa, synthetic construct
MSEVEFSHEYWMRHALTLAKRARDEGEAPVGAVLVLNNRVIGEGWTRRIGLHDPTAHAEIMALRQGGLVMQNSRLIDATLYVTFEPCVMCAGAMINSRIGRVVFGVRNSKRGAAGSLMNVLNYPGMNHRVEITEGILADECAALLCDFYRMPRQVFNAQKKAQSSIN

SEQ ID NO: 3605 - protein, 167 aa, synthetic construct
MSEVEFSHEYWMRHALTLAKRARDEGEAPVGAVLVLNNRVIGEGWVRRIGLHDPTAHAEIMALRQGGLVMQNSRLIDATLYVTFEPCVMCAGAMINSRIGRVVFGVRNSKRGAAGSLMNVLNYPGMNHRVEITEGILADECAALLCDFYRMPRQVFNAQKKAQSSIN

SEQ ID NO: 3606 - protein, 167 aa, synthetic construct
MSEVEFSHEYWMRHALTLAKRARDEGEAPVGAVLVLNNRVIGEGWVRRIGLHDPTAHAEIMALRQGGLVMQNPRLIDATLYVTFEPCVMCAGAMINSRIGRVVFSVRNSKRGAAGSLMNVLNYPGMNHRVEITEGILADECAALLCDFYRMPRQVFNAQKKAQSSIN

SEQ ID NO: 3607 - protein, 167 aa, synthetic construct
MSEVEFSHEYWMRHALTLAKRARDEGEAPVGAVLVLNNRVIGEGWLRRIGLHDPTAHAEIMALRQGGLVMQNPRLIDATLYVTFEPCVMCAGAMINSRIGRVVFGVRNSKRGAAGSLMNVLNYPGMNHRVEITEGILADECAALLCDFYRMPRQVFNAQKKAQSSIN

SEQ ID NO: 3608 - protein, 167 aa, synthetic construct
MSEVEFSHEYWMRHALTLAKRARDEREAPVGAVLVLNNRVIGEGWLRPIGLHDPTAHAEIMALRQGGLVMQNPRLIDATLYVTFEPCVMCAGAMIHSRIGRVVFGVRNSKRGAAGSLMNVLNYPGMNHRVEITEGILADECAALLCDFYRMPRQVFNAQKKAQSSIN

SEQ ID NO: 3609 - protein, 167 aa, synthetic construct
MSEVEFSHEYWMRHALTLAKRARDEGEAPVGAVLVLNNRVIGEGWCRRIGLHDPTAHAEIMALRQGGLVMQNSRLIDATLYVTFEPCVMCAGAMIHSRIGRVVFGVRNSKRGAAGSLMNVLNYPGMNHRVEITEGILADECAALLCDFYRMPRQVFNAQKKAQSSIN

SEQ ID NO: 3610 - protein, 167 aa, synthetic construct
MSEVEFSHEYWMRHALTLAKRARDEGEAPVGAVLVLNNRVIGEGWVRRIGLHDPTAHAEIMALRQGGLVMQNPRLIDATLYVTFEPCVMCAGAMINSRIGRVVFGVRNSKRGAAGSLMNVLNYPGMNHRVEITEGILADECAALLCDFYRMPRQVFNAQKKAQSSIN

SEQ ID NO: 3611 - protein, 167 aa, synthetic construct
MSEVEFSHEYWMRHALTLAKRARDEGEAPVGAVLVLNNRVIGEGWVRRIGLHDPTAHAEIMALRQGGLVMHNPRLIDATLYVTFEPCVMCAGAMINSRIGRVVFGVRNSKRGAAGSLMNVLNYPGMNHRVEITEGILADECAALLCDFYRMPRQVFNAQKKAQSSIN

SEQ ID NO: 3612 - protein, 167 aa, synthetic construct
MSEVEFSHEYWMRHALTLAKRARDEGEAPVGAVLVLNNRVIGEGWLRRIGLHDPTAHAEIMALRQGGLVMQNSRLIDATLYVTFEPCVMCAGAMINSRIGRVVFGVRNSKRGAAGSLMNVLNYPGMNHRVEITEGILADECAALLCDFYRMPRQVFNAQKKAQSSIN

SEQ ID NO: 3613 - protein, 167 aa, synthetic construct
MSEVEFSHEYWMRHALTLAKRARDEGEAPVGAVLVLNNRVIGEGWCRRIGLHDPTAHAEIMALRQGGLVMQNPRLIDATLYVTFEPCVMCAGAMINSRIGRVVFGVRNSKRGAAGSLMNVLNYPGMNHRVEITEGILADECAALLCDFYRMPRQVFNAQKKAQSSIN

SEQ ID NO: 3614 - protein, 167 aa, synthetic construct
MSEVEFSHEYWMRHALTLAKRARDEGEAPVGAVLVLNNRVIGEGWCRRIGLHDPTAHAEIMALRQGGLVMQNPRLIDATLYVTFEPCVMCAGAMINSRIGRVVFGVRNSKRGAAGSLMNVLNYPGMNHRVEITEGILADECAALLCDFYRMPRQVFNAQKKVQSSIN

SEQ ID NO: 3615 - protein, 167 aa, synthetic construct
MSEVEFSHEYWMRHALTLAKRARDEGEAPVGAVLVLNNRVIGEGWIRRIGLHDPTAHAEIMALRQGGLVMQNSRLIDATLYVTFEPCVMCAGAMINSRIGRVVFGVRNSKRGAAGSLMNVLNYPGMNHRVEITEGILADECAALLCDFYRMPRQVFNAQKKAQSSIN

SEQ ID NO: 3616 - protein, 167 aa, synthetic construct
MSEVEFSHEYWMRHALTLAKRARDEGEAPVGAVLVLNNRVIGEGWNRRIGLHDPTAHAEIMALRQGGLVMSNSRLIDATLYVTFEPCVMCAGAMINSRIGRVVFGVRNSKRGAAGSLMNVLNYPGMNHRVEITEGILADECAALLCDFYRMPRQVFNAQKKAQSSIN

SEQ ID NO: 3617 - protein, 167 aa, synthetic construct
MSEVEFSHEYWMRHALTLAKRARDEGEAPVGAVLVLNNRVIGEGWLRRIGLHDPTAHAEIMALRQGGLVMQNPRLIDATLYVTFEPCVMCAGAMIHSRIGRVVFGVRNSKRGAAGSLMNVLNYPGMNHRVEITEGILADECAALLCDFYRMPRQVFNAQKKAQSSIN

SEQ ID NO: 3618 - protein, 167 aa, synthetic construct; identical to SEQ ID NO: 3607

SEQ ID NO: 3619 - protein, 167 aa, synthetic construct
MSEVEFSHEYWMRHALTLAKRARDEGEAPVGAVLVLNNRVIGEGWNRAIGLHDPTAHAEIMALRQGGLVMQNPRLIDATLYVTFEPCVMCAGAMINSRIGRVVFGVRNSKRGAAGSLMNVLNYPGMNHRVEITEGILADECAALLCDFYRMPRQVFNAQKKAQSSIN

SEQ ID NO: 3620 - protein, 167 aa, synthetic construct; identical to SEQ ID NO: 3605

SEQ ID NO: 3621 - protein, 167 aa, synthetic construct; identical to SEQ ID NO: 3610

SEQ ID NO: 3622 - protein, 167 aa, synthetic construct
MSEVEFSHEYWMRHALTLAKRARDEGEVPVGAVLVLNNRVIGEGWLRAIGLHDPTAHAEIMALRQGGLVMQNYRLIDATLYVTFEPCVMCAGAMIHSRIGRVVFGVRNSKRGAAGSLMNVLNYPGMNHRVEITEGILADECAALLCDFYRMPRQVFNAQKKAQSSIN

SEQ ID NO: 3623 - protein, 167 aa, synthetic construct; identical to SEQ ID NO: 3602

SEQ ID NO: 3624 - protein, 167 aa, synthetic construct; identical to SEQ ID NO: 3606

SEQ ID NO: 3625 - protein, 167 aa, synthetic construct
MSEVEFSHEYWMRHALTLAKRARDEGEAPVGAVLVLNNRVIGEGWNRPIGLHDPTAHAEIMALRQGGLVMQNHRLIDAPLYVTFEPCVMCAGAMINSRIGRVVFGVRNSKRGAAGSLMNVLNYPGMNHRVEITEGILADECAALLCDFYRMPRQVFNAQKKAQSSIN

SEQ ID NO: 3626 - protein, 167 aa, synthetic construct
MSEVEFSHEYWMRHALTLAKRARDEGEVPVGAVLVLNNRVIGEGWIRAIGLHDPTAHAEIMALRQGGLVMQNYRLIDATLYVTFEPCVMCAGAMINSRIGRVVFGVRNSKRGAAGSLMNVLNYPGMNHRVEITEGILADECAALLCDFYRMPRQVFNAQKKAQSSIN

SEQ ID NO: 3627 - protein, 167 aa, synthetic construct; identical to SEQ ID NO: 3610

SEQ ID NO: 3628 - protein, 167 aa, synthetic construct; identical to SEQ ID NO: 3612

SEQ ID NO: 3629 - protein, 167 aa, synthetic construct
MSEVEFSHEYWMRHALTLAKRARDEGEAPVGAVLVLNNRVIGEGWCRRIGLHDPTAHAEIMALRQGGLVMQNYRLIDATLYVTFEPCVMCAGAMINSRIGRVVFGVRNSKRGAAGSLMNVLNYPGMNHRVEITEGILADECAALLCDFYRMPRQVFNAQKKVQSSIN

SEQ ID NO: 3630 - protein, 167 aa, synthetic construct; identical to SEQ ID NO: 3611

SEQ ID NO: 3631 - protein, 167 aa, synthetic construct; identical to SEQ ID NO: 3613

SEQ ID NO: 3632 - protein, 167 aa, synthetic construct; identical to SEQ ID NO: 3614

SEQ ID NO: 3633 - protein, 167 aa, synthetic construct; identical to SEQ ID NO: 3610

SEQ ID NO: 3634 - protein, 167 aa, synthetic construct; identical to SEQ ID NO: 3605

SEQ ID NO: 3635 - protein, 167 aa, synthetic construct
MSEVEFSHEYWMRHALTLAKRARDEGEAPVGAVLVLNNRVIGEGWVRPIGLHDPTAHAEIMALRQGGLVMQNSRLIDATLYVTFEPCVMCAGAMINSRIGRVVFGVRNSKRGAAGSLMNVLNYPGMNHRVEITEGILADECAALLCDFYRMPRQVFNAQKKAQSSIN

SEQ ID NO: 3636 - protein, 167 aa, synthetic construct; identical to SEQ ID NO: 3613

SEQ ID NO: 3637 - protein, 167 aa, synthetic construct
MSEVEFSHEYWMRHALTLAKRARDEGEAPVGAVMVLNNRVIGEGWLRRIGLHDPTAHAEIMALRQGGLVMQNPRLIDATLYVTFEPCVMCAGAMINSRIGRVVFGVRNSKRGAAGSLMNVLNYPGMNHRVEITEGILADECAALLCDFYRMPRQVFNAQKKAQSSIN

SEQ ID NO: 3638 - protein, 167 aa, synthetic construct; identical to SEQ ID NO: 3607

SEQ ID NO: 3639 - protein, 167 aa, synthetic construct
MSEVEFSHEYWMRHALTLAKRARDEGEAPVGAVLVLNNRVIGEGWLRPIGLHDPTAHAEIMALKQGGLVMQNPRLIDATLYVTFEPCVMCAGAMINSRIGRVVFGVRNSKRGAAGSLMNVLNYPGMNHRVEITEGILADECAALLCDFYRMPRQVFNAQKKAQSSIN

SEQ ID NO: 3640 - protein, 1699 aa, synthetic construct
MKRTADGSEFESPKKKRKVSSEVEFSHEYWMRHALTLAKRARDEGAGPVGAVLVLNNRVIGEGWNRAIGLHDPTAHAEIMALRQGGLVMQNYRLFDATLYVTFEPCVMCAGAMINSRIGRVVFGVRNSKRGAAGSLMNVLNYPGMNHRVEITEGILADECAALLCDFYRMPRQVFNSQKKAQSSINSGGSSGGSSGSETPGTSESATPESSGGSSGGSDKKYSIGLAIGTNSVGWAVITDEYKVPSKKFKVLGNTDRHSIKKNLIGALLFDSGETAEATRLKRTARRRYTRRKNRICYLQEIFSNEMAKVDDSFFHRLEESFLVEEDKKHERHPIFGNIVDEVAYHEKYPTIYHLRKKLVDSTDKADLRLIYLALAHMIKFRGHFLIEGDLNPDNSDVDKLFIQLVQTYNQLFEENPINASGVDAKAILSARLSKSRRLENLIAQLPGEKKNGLFGNLIALSLGLTPNFKSNFDLAEDAKLQLSKDTYDDDLDNLLAQIGDQYADLFLAAKNLSDAILLSDILRVNTEITKAPLSASMIKRYDEHHQDLTLLKALVRQQLPEKYKEIFFDQSKNGYAGYIDGGASQEEFYKFIKPILEKMDGTEELLVKLNREDLLRKQRTFDNGSIPHQIHLGELHAILRRQEDFYPFLKDNREKIEKILTFRIPYYVGPLARGNSRFAWMTRKSEETITPWNFEEVVDKGASAQSFIERMTNFDKNLPNEKVLPKHSLLYEYFTVYNELTKVKYVTEGMRKPAFLSGEQKKAIVDLLFKTNRKVTVKQLKEDYFKKIECFDSVEISGVEDRFNASLGTYHDLLKIIKDKDFLDNEENEDILEDIVLTLTLFEDREMIEERLKTYAHLFDDKVMKQLKRRRYTGWGRLSRKLINGIRDKQSGKTILDFLKSDGFANRNFMQLIHDDSLTFKEDIQKAQVSGQGDSLHEHIANLAGSPAIKKGILQTVKVVDELVKVMGRHKPENIVIEMARENQTTQKGQKNSRERMKRIEEGIKELGSQILKEHPVENTQLQNEKLYLYYLQNGRDMYVDQELDINRLSDYDVDHIVPQSFLKDDSIDNKVLTRSDKNRGKSDNVPSEEVVKKMKNYWRQLLNAKLITQRKFDNLTKAERGGLSELDKAGFIKRQLVETRQITKHVAQILDSRMNTKYDENDKLIREVKVITLKSKLVSDFRKDFQFYKVREINNYHHAHDAYLNAVVGTALIKKYPKLESEFVYGDYKVYDVRKMIAKSEQEIGKATAKYFFYSNIMNFFKTEITLANGEIRKRPLIETNGETGEIVWDKGRDFATVRKVLSMPQVNIVKKTEVQTGGFSKESILPKRNSDKLIARKKDWDPKKYGGFDSPTVAYSVLVVAKVEKGKSKKLKSVKELLGITIMERSSFEKNPIDFLEAKGYKEVKKDLIIKLPKYSLFELENGRKRMLASAGELQKGNELALPSKYVNFLYLASHYEKLKGSPEDNEQKQLFVEQHKHYLDEIIEQISEFSKRVILADANLDKVLSAYNKHRDKPIREQAENIIHLFTLTNLGAPAAFKYFDTTIDRKRYTSTKEVLDATLIHQSITGLYETRIDLSQLGGDSGGSGGSGGSTNLSDIIEKETGKQLVIQESILMLPEEVEEVIGNKPESDILVHTAYDESTDENVMLLTSDAPEYKPWALVIQDSNGENKIKMLSGGSKRTADGSEFEPKKKRKV

SEQ ID NO: 3641 - protein, 1699 aa, synthetic construct
MKRTADGSEFESPKKKRKVSSEVEFSHEYWMRHALTLAKRARDEGAGPVGAVLVLNNRVIGEGWNRAIGLHDPTAHAEIMALRQGGLVMQNYRLFDATLYVTFEPCVMCAGAMINSRIGRVVFGVRNSKRGAAGSLMNVLNYPGMNHRVEITEGILADECAALLCDFYRMPRRVFNSQKKAQSSINSGGSSGGSSGSETPGTSESATPESSGGSSGGSDKKYSIGLAIGTNSVGWAVITDEYKVPSKKFKVLGNTDRHSIKKNLIGALLFDSGETAEATRLKRTARRRYTRRKNRICYLQEIFSNEMAKVDDSFFHRLEESFLVEEDKKHERHPIFGNIVDEVAYHEKYPTIYHLRKKLVDSTDKADLRLIYLALAHMIKFRGHFLIEGDLNPDNSDVDKLFIQLVQTYNQLFEENPINASGVDAKAILSARLSKSRRLENLIAQLPGEKKNGLFGNLIALSLGLTPNFKSNFDLAEDAKLQLSKDTYDDDLDNLLAQIGDQYADLFLAAKNLSDAILLSDILRVNTEITKAPLSASMIKRYDEHHQDLTLLKALVRQQLPEKYKEIFFDQSKNGYAGYIDGGASQEEFYKFIKPILEKMDGTEELLVKLNREDLLRKQRTFDNGSIPHQIHLGELHAILRRQEDFYPFLKDNREKIEKILTFRIPYYVGPLARGNSRFAWMTRKSEETITPWNFEEVVDKGASAQSFIERMTNFDKNLPNEKVLPKHSLLYEYFTVYNELTKVKYVTEGMRKPAFLSGEQKKAIVDLLFKTNRKVTVKQLKEDYFKKIECFDSVEISGVEDRFNASLGTYHDLLKIIKDKDFLDNEENEDILEDIVLTLTLFEDREMIEERLKTYAHLFDDKVMKQLKRRRYTGWGRLSRKLINGIRDKQSGKTILDFLKSDGFANRNFMQLIHDDSLTFKEDIQKAQVSGQGDSLHEHIANLAGSPAIKKGILQTVKVVDELVKVMGRHKPENIVIEMARENQTTQKGQKNSRERMKRIEEGIKELGSQILKEHPVENTQLQNEKLYLYYLQNGRDMYVDQELDINRLSDYDVDHIVPQSFLKDDSIDNKVLTRSDKNRGKSDNVPSEEVVKKMKNYWRQLLNAKLITQRKFDNLTKAERGGLSELDKAGFIKRQLVETRQITKHVAQILDSRMNTKYDENDKLIREVKVITLKSKLVSDFRKDFQFYKVREINNYHHAHDAYLNAVVGTALIKKYPKLESEFVYGDYKVYDVRKMIAKSEQEIGKATAKYFFYSNIMNFFKTEITLANGEIRKRPLIETNGETGEIVWDKGRDFATVRKVLSMPQVNIVKKTEVQTGGFSKESILPKRNSDKLIARKKDWDPKKYGGFDSPTVAYSVLVVAKVEKGKSKKLKSVKELLGITIMERSSFEKNPIDFLEAKGYKEVKKDLIIKLPKYSLFELENGRKRMLASAGELQKGNELALPSKYVNFLYLASHYEKLKGSPEDNEQKQLFVEQHKHYLDEIIEQISEFSKRVILADANLDKVLSAYNKHRDKPIREQAENIIHLFTLTNLGAPAAFKYFDTTIDRKRYTSTKEVLDATLIHQSITGLYETRIDLSQLGGDSGGSGGSGGSTNLSDIIEKETGKQLVIQESILMLPEEVEEVIGNKPESDILVHTAYDESTDENVMLLTSDAPEYKPWALVIQDSNGENKIKMLSGGSKRTADGSEFEPKKKRKV

SEQ ID NO: 3642 - protein, 1699 aa, synthetic construct
MKRTADGSEFESPKKKRKVSSEVEFSHEYWMRHALTLAKRARDEGAGPVGAVLVLNNRVIGEGWNRAIGLHDPTAHAEIMALRQGGLVMQNYRLFDATLYVTFEPCVMCAGAMINSRIGRVVFGVRNSKRGAAGSLMNVLNYPGMNHRVEITEGILADECAALLCDFYRIPRQVFNSQKKAQSSINSGGSSGGSSGSETPGTSESATPESSGGSSGGSDKKYSIGLAIGTNSVGWAVITDEYKVPSKKFKVLGNTDRHSIKKNLIGALLFDSGETAEATRLKRTARRRYTRRKNRICYLQEIFSNEMAKVDDSFFHRLEESFLVEEDKKHERHPIFGNIVDEVAYHEKYPTIYHLRKKLVDSTDKADLRLIYLALAHMIKFRGHFLIEGDLNPDNSDVDKLFIQLVQTYNQLFEENPINASGVDAKAILSARLSKSRRLENLIAQLPGEKKNGLFGNLIALSLGLTPNFKSNFDLAEDAKLQLSKDTYDDDLDNLLAQIGDQYADLFLAAKNLSDAILLSDILRVNTEITKAPLSASMIKRYDEHHQDLTLLKALVRQQLPEKYKEIFFDQSKNGYAGYIDGGASQEEFYKFIKPILEKMDGTEELLVKLNREDLLRKQRTFDNGSIPHQIHLGELHAILRRQEDFYPFLKDNREKIEKILTFRIPYYVGPLARGNSRFAWMTRKSEETITPWNFEEVVDKGASAQSFIERMTNFDKNLPNEKVLPKHSLLYEYFTVYNELTKVKYVTEGMRKPAFLSGEQKKAIVDLLFKTNRKVTVKQLKEDYFKKIECFDSVEISGVEDRFNASLGTYHDLLKIIKDKDFLDNEENEDILEDIVLTLTLFEDREMIEERLKTYAHLFDDKVMKQLKRRRYTGWGRLSRKLINGIRDKQSGKTILDFLKSDGFANRNFMQLIHDDSLTFKEDIQKAQVSGQGDSLHEHIANLAGSPAIKKGILQTVKVVDELVKVMGRHKPENIVIEMARENQTTQKGQKNSRERMKRIEEGIKELGSQILKEHPVENTQLQNEKLYLYYLQNGRDMYVDQELDINRLSDYDVDHIVPQSFLKDDSIDNKVLTRSDKNRGKSDNVPSEEVVKKMKNYWRQLLNAKLITQRKFDNLTKAERGGLSELDKAGFIKRQLVETRQITKHVAQILDSRMNTKYDENDKLIREVKVITLKSKLVSDFRKDFQFYKVREINNYHHAHDAYLNAVVGTALIKKYPKLESEFVYGDYKVYDVRKMIAKSEQEIGKATAKYFFYSNIMNFFKTEITLANGEIRKRPLIETNGETGEIVWDKGRDFATVRKVLSMPQVNIVKKTEVQTGGFSKESILPKRNSDKLIARKKDWDPKKYGGFDSPTVAYSVLVVAKVEKGKSKKLKSVKELLGITIMERSSFEKNPIDFLEAKGYKEVKKDLIIKLPKYSLFELENGRKRMLASAGELQKGNELALPSKYVNFLYLASHYEKLKGSPEDNEQKQLFVEQHKHYLDEIIEQISEFSKRVILADANLDKVLSAYNKHRDKPIREQAENIIHLFTLTNLGAPAAFKYFDTTIDRKRYTSTKEVLDATLIHQSITGLYETRIDLSQLGGDSGGSGGSGGSTNLSDIIEKETGKQLVIQESILMLPEEVEEVIGNKPESDILVHTAYDESTDENVMLLTSDAPEYKPWALVIQDSNGENKIKMLSGGSKRTADGSEFEPKKKRKV

SEQ ID NO: 3643 - protein, 1699 aa, synthetic construct
MKRTADGSEFESPKKKRKVSSEVEFSHEYWMRHALTLAKRARDERKAPVGAVLVLNNRVIGEGWNRAIGLHDPTAHAEIIALRQGGLVMQNYRLIDATLYVTFEPCVMCAGAMINSRIGRVVFGVRNSKRGAAGSLMNVLNYPGMNHRVEITEGILADECAALLCDFYRMPRQVFNAQKKAQSSINSGGSSGGSSGSETPGTSESATPESSGGSSGGSDKKYSIGLAIGTNSVGWAVITDEYKVPSKKFKVLGNTDRHSIKKNLIGALLFDSGETAEATRLKRTARRRYTRRKNRICYLQEIFSNEMAKVDDSFFHRLEESFLVEEDKKHERHPIFGNIVDEVAYHEKYPTIYHLRKKLVDSTDKADLRLIYLALAHMIKFRGHFLIEGDLNPDNSDVDKLFIQLVQTYNQLFEENPINASGVDAKAILSARLSKSRRLENLIAQLPGEKKNGLFGNLIALSLGLTPNFKSNFDLAEDAKLQLSKDTYDDDLDNLLAQIGDQYADLFLAAKNLSDAILLSDILRVNTEITKAPLSASMIKRYDEHHQDLTLLKALVRQQLPEKYKEIFFDQSKNGYAGYIDGGASQEEFYKFIKPILEKMDGTEELLVKLNREDLLRKQRTFDNGSIPHQIHLGELHAILRRQEDFYPFLKDNREKIEKILTFRIPYYVGPLARGNSRFAWMTRKSEETITPWNFEEVVDKGASAQSFIERMTNFDKNLPNEKVLPKHSLLYEYFTVYNELTKVKYVTEGMRKPAFLSGEQKKAIVDLLFKTNRKVTVKQLKEDYFKKIECFDSVEISGVEDRFNASLGTYHDLLKIIKDKDFLDNEENEDILEDIVLTLTLFEDREMIEERLKTYAHLFDDKVMKQLKRRRYTGWGRLSRKLINGIRDKQSGKTILDFLKSDGFANRNFMQLIHDDSLTFKEDIQKAQVSGQGDSLHEHIANLAGSPAIKKGILQTVKVVDELVKVMGRHKPENIVIEMARENQTTQKGQKNSRERMKRIEEGIKELGSQILKEHPVENTQLQNEKLYLYYLQNGRDMYVDQELDINRLSDYDVDHIVPQSFLKDDSIDNKVLTRSDKNRGKSDNVPSEEVVKKMKNYWRQLLNAKLITQRKFDNLTKAERGGLSELDKAGFIKRQLVETRQITKHVAQILDSRMNTKYDENDKLIREVKVITLKSKLVSDFRKDFQFYKVREINNYHHAHDAYLNAVVGTALIKKYPKLESEFVYGDYKVYDVRKMIAKSEQEIGKATAKYFFYSNIMNFFKTEITLANGEIRKRPLIETNGETGEIVWDKGRDFATVRKVLSMPQVNIVKKTEVQTGGFSKESILPKRNSDKLIARKKDWDPKKYGGFDSPTVAYSVLVVAKVEKGKSKKLKSVKELLGITIMERSSFEKNPIDFLEAKGYKEVKKDLIIKLPKYSLFELENGRKRMLASAGELQKGNELALPSKYVNFLYLASHYEKLKGSPEDNEQKQLFVEQHKHYLDEIIEQISEFSKRVILADANLDKVLSAYNKHRDKPIREQAENIIHLFTLTNLGAPAAFKYFDTTIDRKRYTSTKEVLDATLIHQSITGLYETRIDLSQLGGDSGGSGGSGGSTNLSDIIEKETGKQLVIQESILMLPEEVEEVIGNKPESDILVHTAYDESTDENVMLLTSDAPEYKPWALVIQDSNGENKIKMLSGGSKRTADGSEFEPKKKRKV

SEQ ID NO: 3644 - protein, 1699 aa, synthetic construct
MKRTADGSEFESPKKKRKVSSEVEFSHEYWMRHALTLAKRARDERAGPVGAVLVLNNRVIGEGWNRAIGLHDPTAHAEIMALRQGGLVMQNHRLIDATLYVTFEPCVMCAGAMINSRIGRVVFGVRNSKRGAAGSLMNVLNYPGMNHRVEITEGILADECAALLCDFYRMPRHVFNSQKKAQSSINSGGSSGGSSGSETPGTSESATPESSGGSSGGSDKKYSIGLAIGTNSVGWAVITDEYKVPSKKFKVLGNTDRHSIKKNLIGALLFDSGETAEATRLKRTARRRYTRRKNRICYLQEIFSNEMAKVDDSFFHRLEESFLVEEDKKHERHPIFGNIVDEVAYHEKYPTIYHLRKKLVDSTDKADLRLIYLALAHMIKFRGHFLIEGDLNPDNSDVDKLFIQLVQTYNQLFEENPINASGVDAKAILSARLSKSRRLENLIAQLPGEKKNGLFGNLIALSLGLTPNFKSNFDLAEDAKLQLSKDTYDDDLDNLLAQIGDQYADLFLAAKNLSDAILLSDILRVNTEITKAPLSASMIKRYDEHHQDLTLLKALVRQQLPEKYKEIFFDQSKNGYAGYIDGGASQEEFYKFIKPILEKMDGTEELLVKLNREDLLRKQRTFDNGSIPHQIHLGELHAILRRQEDFYPFLKDNREKIEKILTFRIPYYVGPLARGNSRFAWMTRKSEETITPWNFEEVVDKGASAQSFIERMTNFDKNLPNEKVLPKHSLLYEYFTVYNELTKVKYVTEGMRKPAFLSGEQKKAIVDLLFKTNRKVTVKQLKEDYFKKIECFDSVEISGVEDRFNASLGTYHDLLKIIKDKDFLDNEENEDILEDIVLTLTLFEDREMIEERLKTYAHLFDDKVMKQLKRRRYTGWGRLSRKLINGIRDKQSGKTILDFLKSDGFANRNFMQLIHDDSLTFKEDIQKAQVSGQGDSLHEHIANLAGSPAIKKGILQTVKVVDELVKVMGRHKPENIVIEMARENQTTQKGQKNSRERMKRIEEGIKELGSQILKEHPVENTQLQNEKLYLYYLQNGRDMYVDQELDINRLSDYDVDHIVPQSFLKDDSIDNKVLTRSDKNRGKSDNVPSEEVVKKMKNYWRQLLNAKLITQRKFDNLTKAERGGLSELDKAGFIKRQLVETRQITKHVAQILDSRMNTKYDENDKLIREVKVITLKSKLVSDFRKDFQFYKVREINNYHHAHDAYLNAVVGTALIKKYPKLESEFVYGDYKVYDVRKMIAKSEQEIGKATAKYFFYSNIMNFFKTEITLANGEIRKRPLIETNGETGEIVWDKGRDFATVRKVLSMPQVNIVKKTEVQTGGFSKESILPKRNSDKLIARKKDWDPKKYGGFDSPTVAYSVLVVAKVEKGKSKKLKSVKELLGITIMERSSFEKNPIDFLEAKGYKEVKKDLIIKLPKYSLFELENGRKRMLASAGELQKGNELALPSKYVNFLYLASHYEKLKGSPEDNEQKQLFVEQHKHYLDEIIEQISEFSKRVILADANLDKVLSAYNKHRDKPIREQAENIIHLFTLTNLGAPAAFKYFDTTIDRKRYTSTKEVLDATLIHQSITGLYETRIDLSQLGGDSGGSGGSGGSTNLSDIIEKETGKQLVIQESILMLPEEVEEVIGNKPESDILVHTAYDESTDENVMLLTSDAPEYKPWALVIQDSNGENKIKMLSGGSKRTADGSEFEPKKKRKV

SEQ ID NO: 3645 - protein, 1699 aa, synthetic construct
MKRTADGSEFESPKKKRKVSSEVEFSHEYWMRHALTLAKRARDEGAGPVGAVLVLNNRVIGEGWNRAIGLHDPTAHAEIMALRQGGLVMQNYRLFDATLYVTFEPCVMCAGAMINSRIGRVVFGWRNSKRGAAGSLMNVLNYPGMNHRVEITEGILADECAALLCDFYRMPRQVFNSQKKAQSSINSGGSSGGSSGSETPGTSESATPESSGGSSGGSDKKYSIGLAIGTNSVGWAVITDEYKVPSKKFKVLGNTDRHSIKKNLIGALLFDSGETAEATRLKRTARRRYTRRKNRICYLQEIFSNEMAKVDDSFFHRLEESFLVEEDKKHERHPIFGNIVDEVAYHEKYPTIYHLRKKLVDSTDKADLRLIYLALAHMIKFRGHFLIEGDLNPDNSDVDKLFIQLVQTYNQLFEENPINASGVDAKAILSARLSKSRRLENLIAQLPGEKKNGLFGNLIALSLGLTPNFKSNFDLAEDAKLQLSKDTYDDDLDNLLAQIGDQYADLFLAAKNLSDAILLSDILRVNTEITKAPLSASMIKRYDEHHQDLTLLKALVRQQLPEKYKEIFFDQSKNGYAGYIDGGASQEEFYKFIKPILEKMDGTEELLVKLNREDLLRKQRTFDNGSIPHQIHLGELHAILRRQEDFYPFLKDNREKIEKILTFRIPYYVGPLARGNSRFAWMTRKSEETITPWNFEEVVDKGASAQSFIERMTNFDKNLPNEKVLPKHSLLYEYFTVYNELTKVKYVTEGMRKPAFLSGEQKKAIVDLLFKTNRKVTVKQLKEDYFKKIECFDSVEISGVEDRFNASLGTYHDLLKIIKDKDFLDNEENEDILEDIVLTLTLFEDREMIEERLKTYAHLFDDKVMKQLKRRRYTGWGRLSRKLINGIRDKQSGKTILDFLKSDGFANRNFMQLIHDDSLTFKEDIQKAQVSGQGDSLHEHIANLAGSPAIKKGILQTVKVVDELVKVMGRHKPENIVIEMARENQTTQKGQKNSRERMKRIEEGIKELGSQILKEHPVENTQLQNEKLYLYYLQNGRDMYVDQELDINRLSDYDVDHIVPQSFLKDDSIDNKVLTRSDKNRGKSDNVPSEEVVKKMKNYWRQLLNAKLITQRKFDNLTKAERGGLSELDKAGFIKRQLVETRQITKHVAQILDSRMNTKYDENDKLIREVKVITLKSKLVSDFRKDFQFYKVREINNYHHAHDAYLNAVVGTALIKKYPKLESEFVYGDYKVYDVRKMIAKSEQEIGKATAKYFFYSNIMNFFKTEITLANGEIRKRPLIETNGETGEIVWDKGRDFATVRKVLSMPQVNIVKKTEVQTGGFSKESILPKRNSDKLIARKKDWDPKKYGGFDSPTVAYSVLVVAKVEKGKSKKLKSVKELLGITIMERSSFEKNPIDFLEAKGYKEVKKDLIIKLPKYSLFELENGRKRMLASAGELQKGNELALPSKYVNFLYLASHYEKLKGSPEDNEQKQLFVEQHKHYLDEIIEQISEFSKRVILADANLDKVLSAYNKHRDKPIREQAENIIHLFTLTNLGAPAAFKYFDTTIDRKRYTSTKEVLDATLIHQSITGLYETRIDLSQLGGDSGGSGGSGGSTNLSDIIEKETGKQLVIQESILMLPEEVEEVIGNKPESDILVHTAYDESTDENVMLLTSDAPEYKPWALVIQDSNGENKIKMLSGGSKRTADGSEFEPKKKRKV

SEQ ID NO: 3646 - protein, 1699 aa, synthetic construct
MKRTADGSEFESPKKKRKVSSEVEFSHEYWMRHALTLAKRARDERKAPVGAVLVLNNRVIGEGWNRAIGLHDPTAHAEIIALRQGGLVMQNYRLIDATLYVTFEPCVMCAGAMINSRIGRVVFGWRNSKRGAAGSLMNVLNYPGMNHRVEITEGILADECAALLCDFYRMPRQVFNAQKKAQSSINSGGSSGGSSGSETPGTSESATPESSGGSSGGSDKKYSIGLAIGTNSVGWAVITDEYKVPSKKFKVLGNTDRHSIKKNLIGALLFDSGETAEATRLKRTARRRYTRRKNRICYLQEIFSNEMAKVDDSFFHRLEESFLVEEDKKHERHPIFGNIVDEVAYHEKYPTIYHLRKKLVDSTDKADLRLIYLALAHMIKFRGHFLIEGDLNPDNSDVDKLFIQLVQTYNQLFEENPINASGVDAKAILSARLSKSRRLENLIAQLPGEKKNGLFGNLIALSLGLTPNFKSNFDLAEDAKLQLSKDTYDDDLDNLLAQIGDQYADLFLAAKNLSDAILLSDILRVNTEITKAPLSASMIKRYDEHHQDLTLLKALVRQQLPEKYKEIFFDQSKNGYAGYIDGGASQEEFYKFIKPILEKMDGTEELLVKLNREDLLRKQRTFDNGSIPHQIHLGELHAILRRQEDFYPFLKDNREKIEKILTFRIPYYVGPLARGNSRFAWMTRKSEETITPWNFEEVVDKGASAQSFIERMTNFDKNLPNEKVLPKHSLLYEYFTVYNELTKVKYVTEGMRKPAFLSGEQKKAIVDLLFKTNRKVTVKQLKEDYFKKIECFDSVEISGVEDRFNASLGTYHDLLKIIKDKDFLDNEENEDILEDIVLTLTLFEDREMIEERLKTYAHLFDDKVMKQLKRRRYTGWGRLSRKLINGIRDKQSGKTILDFLKSDGFANRNFMQLIHDDSLTFKEDIQKAQVSGQGDSLHEHIANLAGSPAIKKGILQTVKVVDELVKVMGRHKPENIVIEMARENQTTQKGQKNSRERMKRIEEGIKELGSQILKEHPVENTQLQNEKLYLYYLQNGRDMYVDQELDINRLSDYDVDHIVPQSFLKDDSIDNKVLTRSDKNRGKSDNVPSEEVVKKMKNYWRQLLNAKLITQRKFDNLTKAERGGLSELDKAGFIKRQLVETRQITKHVAQILDSRMNTKYDENDKLIREVKVITLKSKLVSDFRKDFQFYKVREINNYHHAHDAYLNAVVGTALIKKYPKLESEFVYGDYKVYDVRKMIAKSEQEIGKATAKYFFYSNIMNFFKTEITLANGEIRKRPLIETNGETGEIVWDKGRDFATVRKVLSMPQVNIVKKTEVQTGGFSKESILPKRNSDKLIARKKDWDPKKYGGFDSPTVAYSVLVVAKVEKGKSKKLKSVKELLGITIMERSSFEKNPIDFLEAKGYKEVKKDLIIKLPKYSLFELENGRKRMLASAGELQKGNELALPSKYVNFLYLASHYEKLKGSPEDNEQKQLFVEQHKHYLDEIIEQISEFSKRVILADANLDKVLSAYNKHRDKPIREQAENIIHLFTLTNLGAPAAFKYFDTTIDRKRYTSTKEVLDATLIHQSITGLYETRIDLSQLGGDSGGSGGSGGSTNLSDIIEKETGKQLVIQESILMLPEEVEEVIGNKPESDILVHTAYDESTDENVMLLTSDAPEYKPWALVIQDSNGENKIKMLSGGSKRTADGSEFEPKKKRKV

SEQ ID NO: 3647 - protein, 1699 aa, synthetic construct
MKRTADGSEFESPKKKRKVSSEVEFSHEYWMRHALTLAKRARDEGEAPVGAVLVLNNRVIGEGWNRRIGLHDPTAHAEIMALRQGGLVMQNSRLIDATLYVTFEPCVMCAGAMINSRIGRVVFGVRNSKRGAAGSLMNVLNYPGMNHRVEITEGILADECAALLCDFYRMPRQVFNAQKKAQSSINSGGSSGGSSGSETPGTSESATPESSGGSSGGSDKKYSIGLAIGTNSVGWAVITDEYKVPSKKFKVLGNTDRHSIKKNLIGALLFDSGETAEATRLKRTARRRYTRRKNRICYLQEIFSNEMAKVDDSFFHRLEESFLVEEDKKHERHPIFGNIVDEVAYHEKYPTIYHLRKKLVDSTDKADLRLIYLALAHMIKFRGHFLIEGDLNPDNSDVDKLFIQLVQTYNQLFEENPINASGVDAKAILSARLSKSRRLENLIAQLPGEKKNGLFGNLIALSLGLTPNFKSNFDLAEDAKLQLSKDTYDDDLDNLLAQIGDQYADLFLAAKNLSDAILLSDILRVNTEITKAPLSASMIKRYDEHHQDLTLLKALVRQQLPEKYKEIFFDQSKNGYAGYIDGGASQEEFYKFIKPILEKMDGTEELLVKLNREDLLRKQRTFDNGSIPHQIHLGELHAILRRQEDFYPFLKDNREKIEKILTFRIPYYVGPLARGNSRFAWMTRKSEETITPWNFEEVVDKGASAQSFIERMTNFDKNLPNEKVLPKHSLLYEYFTVYNELTKVKYVTEGMRKPAFLSGEQKKAIVDLLFKTNRKVTVKQLKEDYFKKIECFDSVEISGVEDRFNASLGTYHDLLKIIKDKDFLDNEENEDILEDIVLTLTLFEDREMIEERLKTYAHLFDDKVMKQLKRRRYTGWGRLSRKLINGIRDKQSGKTILDFLKSDGFANRNFMQLIHDDSLTFKEDIQKAQVSGQGDSLHEHIANLAGSPAIKKGILQTVKVVDELVKVMGRHKPENIVIEMARENQTTQKGQKNSRERMKRIEEGIKELGSQILKEHPVENTQLQNEKLYLYYLQNGRDMYVDQELDINRLSDYDVDHIVPQSFLKDDSIDNKVLTRSDKNRGKSDNVPSEEVVKKMKNYWRQLLNAKLITQRKFDNLTKAERGGLSELDKAGFIKRQLVETRQITKHVAQILDSRMNTKYDENDKLIREVKVITLKSKLVSDFRKDFQFYKVREINNYHHAHDAYLNAVVGTALIKKYPKLESEFVYGDYKVYDVRKMIAKSEQEIGKATAKYFFYSNIMNFFKTEITLANGEIRKRPLIETNGETGEIVWDKGRDFATVRKVLSMPQVNIVKKTEVQTGGFSKESILPKRNSDKLIARKKDWDPKKYGGFDSPTVAYSVLVVAKVEKGKSKKLKSVKELLGITIMERSSFEKNPIDFLEAKGYKEVKKDLIIKLPKYSLFELENGRKRMLASAGELQKGNELALPSKYVNFLYLASHYEKLKGSPEDNEQKQLFVEQHKHYLDEIIEQISEFSKRVILADANLDKVLSAYNKHRDKPIREQAENIIHLFTLTNLGAPAAFKYFDTTIDRKRYTSTKEVLDATLIHQSITGLYETRIDLSQLGGDSGGSGGSGGSTNLSDIIEKETGKQLVIQESILMLPEEVEEVIGNKPESDILVHTAYDESTDENVMLLTSDAPEYKPWALVIQDSNGENKIKMLSGGSKRTADGSEFEPKKKRKV

SEQ ID NO: 3648 - protein, 1699 aa, synthetic construct
MKRTADGSEFESPKKKRKVSSEVEFSHEYWMRHALTLAKRARDEGEGPVGAVLVLNNRVIGEGWNRRIGLHDPTAHAEIMALRQGGLVMQNCKLIDATLYVTFEPCVMCAGAMIHSRIGRVVFGVRNSKRGAAGSLMNVLNYPGMNHRVEITEGILADECAALLCDFYRMPRQVFNAQKKAQSSINSGGSSGGSSGSETPGTSESATPESSGGSSGGSDKKYSIGLAIGTNSVGWAVITDEYKVPSKKFKVLGNTDRHSIKKNLIGALLFDSGETAEATRLKRTARRRYTRRKNRICYLQEIFSNEMAKVDDSFFHRLEESFLVEEDKKHERHPIFGNIVDEVAYHEKYPTIYHLRKKLVDSTDKADLRLIYLALAHMIKFRGHFLIEGDLNPDNSDVDKLFIQLVQTYNQLFEENPINASGVDAKAILSARLSKSRRLENLIAQLPGEKKNGLFGNLIALSLGLTPNFKSNFDLAEDAKLQLSKDTYDDDLDNLLAQIGDQYADLFLAAKNLSDAILLSDILRVNTEITKAPLSASMIKRYDEHHQDLTLLKALVRQQLPEKYKEIFFDQSKNGYAGYIDGGASQEEFYKFIKPILEKMDGTEELLVKLNREDLLRKQRTFDNGSIPHQIHLGELHAILRRQEDFYPFLKDNREKIEKILTFRIPYYVGPLARGNSRFAWMTRKSEETITPWNFEEVVDKGASAQSFIERMTNFDKNLPNEKVLPKHSLLYEYFTVYNELTKVKYVTEGMRKPAFLSGEQKKAIVDLLFKTNRKVTVKQLKEDYFKKIECFDSVEISGVEDRFNASLGTYHDLLKIIKDKDFLDNEENEDILEDIVLTLTLFEDREMIEERLKTYAHLFDDKVMKQLKRRRYTGWGRLSRKLINGIRDKQSGKTILDFLKSDGFANRNFMQLIHDDSLTFKEDIQKAQVSGQGDSLHEHIANLAGSPAIKKGILQTVKVVDELVKVMGRHKPENIVIEMARENQTTQKGQKNSRERMKRIEEGIKELGSQILKEHPVENTQLQNEKLYLYYLQNGRDMYVDQELDINRLSDYDVDHIVPQSFLKDDSIDNKVLTRSDKNRGKSDNVPSEEVVKKMKNYWRQLLNAKLITQRKFDNLTKAERGGLSELDKAGFIKRQLVETRQITKHVAQILDSRMNTKYDENDKLIREVKVITLKSKLVSDFRKDFQFYKVREINNYHHAHDAYLNAVVGTALIKKYPKLESEFVYGDYKVYDVRKMIAKSEQEIGKATAKYFFYSNIMNFFKTEITLANGEIRKRPLIETNGETGEIVWDKGRDFATVRKVLSMPQVNIVKKTEVQTGGFSKESILPKRNSDKLIARKKDWDPKKYGGFDSPTVAYSVLVVAKVEKGKSKKLKSVKELLGITIMERSSFEKNPIDFLEAKGYKEVKKDLIIKLPKYSLFELENGRKRMLASAGELQKGNELALPSKYVNFLYLASHYEKLKGSPEDNEQKQLFVEQHKHYLDEIIEQISEFSKRVILADANLDKVLSAYNKHRDKPIREQAENIIHLFTLTNLGAPAAFKYFDTTIDRKRYTSTKEVLDATLIHQSITGLYETRIDLSQLGGDSGGSGGSGGSTNLSDIIEKETGKQLVIQESILMLPEEVEEVIGNKPESDILVHTAYDESTDENVMLLTSDAPEYKPWALVIQDSNGENKIKMLSGGSKRTADGSEFEPKKKRKV

SEQ ID NO: 3649 - protein, 1505 aa, synthetic construct
MKRTADGSEFESPKKKRKVSSEVEFSHEYWMRHALTLAKRARDEGAGPVGAVLVLNNRVIGEGWNRAIGLHDPTAHAEIMALRQGGLVMQNYRLFDATLYVTFEPCVMCAGAMINSRIGRVVFGVRNSKRGAAGSLMNVLNYPGMNHRVEITEGILADECAALLCDFYRMPRQVFNSQKKAQSSINSGGSSGGSSGSETPGTSESATPESSGGSSGGSAAFKPNPINYILGLAIGIASVGWAMVEIDEEGNPIRLIDLGVRVFERAEVPKTGDSLAMARRLARSVRRLTRRRAHRLLRARRLLKREGVLQAADFDENGLITSLPNTPWQLRAAALDRKLTPLEWSAVLLHLIKHRGYLSQRKNEGETAAKELGALLKGVANNAHALQTGDFRTPAELALNKFEKESGHIRNQRGDYSHTFSRKDLQAELILLFEKQKEFGNPHVSGGLKEGIETLLMTQRPALSGDAVQKMLGHCTLEPTEPKAAKNTYTAERFIWLTKLNNLRILEQGSERPLTDTERSTLMDEPYRKSKLTYAQARKLLGLEDTAFFKGLRYGKDNAEASTLMEMKAYHAISRALEKEGLKDKKSPLNLSSELQDEIGTAFSLFKTDEDITGRLKDRVQPEILEALLKHISFDKFVQISLKALRRIVPLMEQGKRYDEACAEIYGVHYGKKNTEEKIYLPPIPADEIRNPVVLRALSQARKVINGVVRRYGSPARIHIETAREVGKSFKDRKEIAKRQEENRKDREKAAAKFREYFPNFVGEPKSKDILKLRLYEQQHGKCLYSGKEINLVRLNEKGYVEIDHALPFSRTWDDSFNNKVLVLGSENQNKGNQTPYEYFNGKDNSREWQEFKARVETSRFPSSKKQRILLQKFDEDGFKECNLNDTRYVNRFLCQFVADHILLTGKGKRRVVASNGQITNLLRGFWRLRKVRAENDRHHALDAVVVACSTVAMQQKITRFVRYKEMNAFDGKTVDKETGKVLYQKTHFPQPWEFFAQEVMIRVFGKPDGKPEFEEADTPEKLRTLLAEKLSSRPEAVHEYVTPLFVSRAPNRKMSGAHKDTLRSAKRFVKHNEKISVKRVWLTEIKLADLENMVNYKNGREIELYEALKARLEAYGGNAKQAFDPKDNPFYKKGGQLVKAVRVEKTQKSGVLLNKKNAYTIADNGDMVRVDVFCKVDKKGKNQYFIVPIYAWQVAENILPDIDCKGYRIDDSYTFCFSLHKYDLIAFQKDEKSKVEFAYYINCDSSSGGFYLAWHDKGSREQRFRISTQNLALIQKYQVNELGKEIRPCRLKKRPPVSGGSGGSGGSTNLSDIIEKETGKQLVIQESILMLPEEVEEVIGNKPESDILVHTAYDESTDENVMLLTSDAPEYKPWALVIQDSNGENKIKMLSGGSGGSGGSTNLSDIIEKETGKQLVIQESILMLPEEVEEVIGNKPESDILVHTAYDESTDENVMLLTSDAPEYKPWALVIQDSNGENKIKMLSGGSKRTADGSEFEPKKKRKV

SEQ ID NO: 3650 - protein, 1478 aa, synthetic construct
MKRTADGSEFESPKKKRKVSSEVEFSHEYWMRHALTLAKRARDEGAGPVGAVLVLNNRVIGEGWNRAIGLHDPTAHAEIMALRQGGLVMQNYRLFDATLYVTFEPCVMCAGAMINSRIGRVVFGVRNSKRGAAGSLMNVLNYPGMNHRVEITEGILADECAALLCDFYRMPRQVFNSQKKAQSSINSGGSSGGSSGSETPGTSESATPESSGGSSGGSGKRNYILGLAIGITSVGYGIIDYETRDVIDAGVRLFKEANVENNEGRRSKRGARRLKRRRRHRIQRVKKLLFDYNLLTDHSELSGINPYEARVKGLSQKLSEEEFSAALLHLAKRRGVHNVNEVEEDTGNELSTKEQISRNSKALEEKYVAELQLERLKKDGEVRGSINRFKTSDYVKEAKQLLKVQKAYHQLDQSFIDTYIDLLETRRTYYEGPGEGSPFGWKDIKEWYEMLMGHCTYFPEELRSVKYAYNADLYNALNDLNNLVITRDENEKLEYYEKFQIIENVFKQKKKPTLKQIAKEILVNEEDIKGYRVTSTGKPEFTNLKVYHDIKDITARKEIIENAELLDQIAKILTIYQSSEDIQEELTNLNSELTQEEIEQISNLKGYTGTHNLSLKAINLILDELWHTNDNQIAIFNRLKLVPKKVDLSQQKEIPTTLVDDFILSPVVKRSFIQSIKVINAIIKKYGLPNDIIIELAREKNSKDAQKMINEMQKRNRQTNERIEEIIRTTGKENAKYLIEKIKLHDMQEGKCLYSLEAIPLEDLLNNPFNYEVDHIIPRSVSFDNSFNNKVLVKQEENSKKGNRTPFQYLSSSDSKISYETFKKHILNLAKGKGRISKTKKEYLLEERDINRFSVQKDFINRNLVDTRYATRGLMNLLRSYFRVNNLDVKVKSINGGFTSFLRRKWKFKKERNKGYKHHAEDALIIANADFIFKEWKKLDKAKKVMENQMFEEKQAESMPEIETEQEYKEIFITPHQIKHIKDFKDYKYSHRVDKKPNRELINDTLYSTRKDDKGNTLIVNNLNGLYDKDNDKLKKLINKSPEKLLMYHHDPQTYQKLKLIMEQYGDEKNPLYKYYEETGNYLTKYSKKDNGPVIKKIKYYGNKLNAHLDITDDYPNSRNKVVKLSLKPYRFDVYLDNGVYKFVTVKNLDVIKKENYYEVNSKCYEEAKKLKKISNQAEFIASFYNNDLIKINGELYRVIGVNNDLLNRIEVNMIDITYREYLENMNDKRPPRIIKTIASKTQSIKKYSTDILGNLYEVKSKKHPQIIKKGSGGSGGSGGSTNLSDIIEKETGKQLVIQESILMLPEEVEEVIGNKPESDILVHTAYDESTDENVMLLTSDAPEYKPWALVIQDSNGENKIKMLSGGSGGSGGSTNLSDIIEKETGKQLVIQESILMLPEEVEEVIGNKPESDILVHTAYDESTDENVMLLTSDAPEYKPWALVIQDSNGENKIKMLSGGSKRTADGSEFEPKKKRKV

SEQ ID NO: 3651 - protein, 1792 aa, synthetic construct
MKRTADGSEFESPKKKRKVSSEVEFSHEYWMRHALTLAKRARDEGAGPVGAVLVLNNRVIGEGWNRAIGLHDPTAHAEIMALRQGGLVMQNYRLFDATLYVTFEPCVMCAGAMINSRIGRVVFGVRNSKRGAAGSLMNVLNYPGMNHRVEITEGILADECAALLCDFYRMPRQVFNSQKKAQSSINSGGSSGGSSGSETPGTSESATPESSGGSSGGSDKKYSIGLAIGTNSVGWAVITDEYKVPSKKFKVLGNTDRHSIKKNLIGALLFDSGETAEATRLKRTARRRYTRRKNRICYLQEIFSNEMAKVDDSFFHRLEESFLVEEDKKHERHPIFGNIVDEVAYHEKYPTIYHLRKKLVDSTDKADLRLIYLALAHMIKFRGHFLIEGDLNPDNSDVDKLFIQLVQTYNQLFEENPINASGVDAKAILSARLSKSRRLENLIAQLPGEKKNGLFGNLIALSLGLTPNFKSNFDLAEDAKLQLSKDTYDDDLDNLLAQIGDQYADLFLAAKNLSDAILLSDILRVNTEITKAPLSASMIKRYDEHHQDLTLLKALVRQQLPEKYKEIFFDQSKNGYAGYIDGGASQEEFYKFIKPILEKMDGTEELLVKLNREDLLRKQRTFDNGSIPHQIHLGELHAILRRQEDFYPFLKDNREKIEKILTFRIPYYVGPLARGNSRFAWMTRKSEETITPWNFEEVVDKGASAQSFIERMTNFDKNLPNEKVLPKHSLLYEYFTVYNELTKVKYVTEGMRKPAFLSGEQKKAIVDLLFKTNRKVTVKQLKEDYFKKIECFDSVEISGVEDRFNASLGTYHDLLKIIKDKDFLDNEENEDILEDIVLTLTLFEDREMIEERLKTYAHLFDDKVMKQLKRRRYTGWGRLSRKLINGIRDKQSGKTILDFLKSDGFANRNFMQLIHDDSLTFKEDIQKAQVSGQGDSLHEHIANLAGSPAIKKGILQTVKVVDELVKVMGRHKPENIVIEMARENQTTQKGQKNSRERMKRIEEGIKELGSQILKEHPVENTQLQNEKLYLYYLQNGRDMYVDQELDINRLSDYDVDHIVPQSFLKDDSIDNKVLTRSDKNRGKSDNVPSEEVVKKMKNYWRQLLNAKLITQRKFDNLTKAERGGLSELDKAGFIKRQLVETRQITKHVAQILDSRMNTKYDENDKLIREVKVITLKSKLVSDFRKDFQFYKVREINNYHHAHDAYLNAVVGTALIKKYPKLESEFVYGDYKVYDVRKMIAKSEQEIGKATAKYFFYSNIMNFFKTEITLANGEIRKRPLIETNGETGEIVWDKGRDFATVRKVLSMPQVNIVKKTEVQTGGFSKESIRPKRNSDKLIARKKDWDPKKYGGFVSPTVAYSVLVVAKVEKGKSKKLKSVKELLGITIMERSSFEKNPIDFLEAKGYKEVKKDLIIKLPKYSLFELENGRKRMLASARFLQKGNELALPSKYVNFLYLASHYEKLKGSPEDNEQKQLFVEQHKHYLDEIIEQISEFSKRVILADANLDKVLSAYNKHRDKPIREQAENIIHLFTLTNLGAPRAFKYFDTTIDRKVYRSTKEVLDATLIHQSITGLYETRIDLSQLGGDSGGSGGSGGSTNLSDIIEKETGKQLVIQESILMLPEEVEEVIGNKPESDILVHTAYDESTDENVMLLTSDAPEYKPWALVIQDSNGENKIKMLSGGSGGSGGSTNLSDIIEKETGKQLVIQESILMLPEEVEEVIGNKPESDILVHTAYDESTDENVMLLTSDAPEYKPWALVIQDSNGENKIKMLSGGSKRTADGSEFEPKKKRKV

SEQ ID NO: 3652 - protein, 1315 aa, synthetic construct
MKRTADGSEFESPKKKRKVSSEVEFSHEYWMRHALTLAKRARDEGAGPVGAVLVLNNRVIGEGWNRAIGLHDPTAHAEIMALRQGGLVMQNYRLFDATLYVTFEPCVMCAGAMINSRIGRVVFGVRNSKRGAAGSLMNVLNYPGMNHRVEITEGILADECAALLCDFYRMPRQVFNSQKKAQSSINSGGSSGGSSGSETPGTSESATPESSGGSSGGSARILAFAIGISSIGWAFSENDELKDCGVRIFTKVENPKTGESLALPRRLARSARKRYARRKARLNHLKHLIANEFKLNYEDYQSFDESLAKAYKGSLISPYELRFRALNELLSKQDFARVILHIAKRRGYDDIKNSDDKEKGAILKAIKQNEEKLANYQSVGEYLYKEYFQKFKENSKEFTNVRNKKESYERCIAQSFLKDELKLIFKKQREFGFSFSKKFEEEVLSVAFYKRALKDFSHLVGNCSFFTDEKRAPKNSPLAFMFVALTRIINLLNNLKNTEGILYTKDDLNALLNEVLKNGTLTYKQTKKLLGLSDDYEFKGEKGTYFIEFKKYKEFIKALGEHNLSQDDLNEIAKDITLIKDEIKLKKALAKYDLNQNQIDSLSKLEFKDHLNISFKALKLVTPLMLEGKKYDEACNELNLKVAINEDKKDFLPAFNETYYKDEVTNPVVLRAIKEYRKVLNALLKKYGKVHKINIELAREVGKNHSQRAKIEKEQNENYKAKKDAELECEKLGLKINSKNILKLRLFKEQKEFCAYSGEKIKISDLQDEKMLEIDHIYPYSRSFDDSYMNKVLVFTKQNQEKLNQTPFEAFGNDSAKWQKIEVLAKNLPTKKQKRILDKNYKDKEQKNFKDRNLNDTRYIARLVLNYTKDYLDFLPLSDDENTKLNDTQKGSKVHVEAKSGMLTSALRHTWGFSAKDRNNHLHHAIDAVIIAYANNSIVKAFSDFKKEQESNSAELYAKKISELDYKNKRKFFEPFSGFRQKVLDKIDEIFVSKPERKKPSGALHEETFRKEEEFYQSYGGKEGVLKALELGKIRKVNGKIVKNGDMFRVDIFKHKKTNKFYAVPIYTMDFALKVLPNKAVARSKKGEIKDWILMDENYEFCFSLYKDSLILIQTKKMQEPEFVYYNAFTSSTVSLIVSKHDNKFETLSKNQKILFKNANEKEVIAKSIGIQNLKVFEKYIVSALGEVTKAEFRQREDFKKSGGSGGSGGSTNLSDIIEKETGKQLVIQESILMLPEEVEEVIGNKPESDILVHTAYDESTDENVMLLTSDAPEYKPWALVIQDSNGENKIKMLSGGSKRTADGSEFEPKKKRKV

SEQ ID NO: 3653 - DNA, 7917 bp, synthetic construct
  source 1..7917: mol_type = other DNA
tagttattaatagtaatcaattacggggtcattagttcatagcccatatatggagttccgcgttacataacttacggtaaatggcccgcctggctgaccgcccaacgacccccgcccattgacgtcaataatgacgtatgttcccatagtaacgccaatagggactttccattgacgtcaatgggtggagtatttacggtaaactgcccacttggcagtacatcaagtgtatcatatgccaagtacgccccctattgacgtcaatgacggtaaatggcccgcctggcattatgcccagtacatgaccttatgggactttcctacttggcagtacatctacgtattagtcatcgctattaccatggtgatgcggttttggcagtacatcaatgggcgtggatagcggtttgactcacggggatttccaagtctccaccccattgacgtcaatgggagtttgttttggcaccaaaatcaacgggactttccaaaatgtcgtaacaactccgccccattgacgcaaatgggcggtaggcgtgtacggtgggaggtctatataagcagagctggtttagtgaaccgtcagatccgctagagatccgcggccgctaatacgactcactatagggagagccgccaccatgaaacggacagccgacggaagcgagttcgagtcaccaaagaagaagcggaaagtcagttctgaggtggagttttcccacgagtactggatgagacatgccctgaccctggccaagagggcacgggatgagggggcgggtcctgtgggagccgtgctggtgctgaacaatagagtgatcggcgagggctggaacagagccatcggcctgcacgacccaacagcccatgccgaaattatggccctgagacagggcggcctggtcatgcagaactacagactgtttgacgccaccctgtacgtgacattcgagccttgcgtgatgtgcgccggcgccatgatcaactctaggatcggccgcgtggtgtttggcgtgaggaactcaaaaagaggcgccgcaggctccctgatgaacgtgctgaactaccccggcatgaatcaccgcgtcgaaattaccgagggaatcctggcagatgaatgtgccgccctgctgtgcgatttctatcggatgcctagacaggtgttcaattctcagaagaaggcccagagctccatcaactctggcggatctagcggaggatcctctggcagcgagacaccaggaacaagcgagtcagcaacaccagagagcagtggcggcagcagcggcggcagcgcagcattcaagcctaacccaatcaattacatcctgggactggcaatcggaatcgcatccgtgggatgggctatggtggagatcgacgaggaggggaatcctatccggctgatcgatctgggcgtgagagtgtttgagagggccgaggtgccaaagaccggcgattctctggctatggcccggagactggcacggagcgtgaggcgcctgacacggagaagggcacacaggctgctgagggcacgccggctgctgaagagagagggcgtgctgcaggcagcagacttcgatgagaatggcctgatcacgagcttgccaaacaccccctggcagctgagagcagccgccctggacaggaagctgacaccactggagtggtctgccgtgctgctgcacctgatcaagcaccgcggctacctgagccagcggaagaacgagggagagacagcagccaaggagctgggcgccctgctgaagggagtggccaacaatgcccacgccctgcagaccggcgatttcaggacacctgccgagctggccctgaataagtttgagaaggagtccggccacatcagaaaccagaggggcgactatagccacaccttctcccgcaaggatctgcaggccgagctgatcctgctgttcgagaagcagaaggagtttggcaatccacacgtgagcggaggcctgaaggagggaatcgagaccctgctgatgacacagaggcctgccctgtccggcgacgcagtgcagaagatgctggggcactgcaccctcgagcctacagagccaaaggccgccaagaacacctacacagccgagcggtttatctggctgacaaagctgaacaatctgagaatcctggagcagggatccgagaggccactgaccgacacagagaggtccaccctgatggatgagccttaccggaagtctaaactgacatatgcccaggccagaaagctgctgggcctggaggacaccgccttctttaagggcctgagatacggcaaggataatgccgaggcctccacactgatggagatgaaggcctatcacgccatctctcgcgccctggagaaggagggcctgaaggacaagaagtcccccctgaacctgagctccgagctgcaggatgagatcggcaccgccttctctctgtttaagaccgacgaggatatcacaggccgcctgaaggacagggtgcagcctgagatcctggaggccctgctgaagcacatctctttcgataagtttgtgcagatcagcctgaaggccctgagaaggatcgtgccactgatggagcagggcaagcggtacgacgaggcctgcgccgagatctacggcgttcactatggcaagaagaacacagaggagaagatctatctgccccctatccctgccgacgagatcagaaatcctgtggtgctgagggccctgtcccaggcaagaaaagtgatcaacggagtggtgcgccggtacggatctccagcccggatccacatcgagaccgccagagaagtgggcaagagcttcaaggaccggaaggagatcgcgaagagacaggaggagaatcgcaaggatcgggagaaggccgccgccaagtttagggagtacttccctaactttgtgggcgagccaaagtctaaggacatcctgaagctgcgcctgtacgagcagcagcacggcaagtgtctgtatagcggcaaagagatcaatctggtgcggctgaacgagaagggctatgtggagatcgatcacgccctgcctttctccagaacctgggacgattcttttaacaataaggtgctggtgctgggcagcgagaaccagaataagggcaatcagacaccatacgagtatttcaatggcaaggacaactccagggagtggcaggagttcaaggcccgcgtggagacctctagatttcccagtagcaagaagcagcggatcctgctgcagaagttcgacgaggatggctttaaggagtgcaacctgaatgacaccagatacgtgaaccggttcctgtgccagtttgtggccgatcacatcctgctgaccggcaagggcaagagaagggtggtcgcctctaatggccagatcacaaacctgctgagggggttttggagactgaggaaggtgcgggcagagaatgacagacaccacgcactggatgcagtggtggtggcatgcagcaccgtggcaatgcagcagaagatcacaagattcgtgaggtataaggagatgaacgcctttgacggcaagaccgtcgataaggagacaggcaaggtgctgtaccagaagacccacttcccccagccttgggagttctttgcccaggaagttatgatccgggtgttcggcaagccagacggcaagcctgagtttgaggaggccgataccccagagaagctgaggacactgctggcagagaagctgtctagcaggccagaggcagtgcacgagtacgtgaccccgctgttcgtgtccagggcacccaatcggaagatgtctggcgcccacaaggacacactgagaagcgccaagaggtttgtgaagcacaacgagaagatctccgtgaagagagtgtggctgaccgagatcaagctggccgatctggagaacatggtgaattacaagaacggcagggagatcgagctgtatgaggccctgaaggcaaggctggaggcctacggaggaaatgccaagcaggccttcgacccaaaggataaccccttttataagaagggaggacagctggtgaaggccgtgcgggtggagaagacccagaaaagcggcgtgctgctgaataagaagaacgcctacacaatcgccgacaatggtgatatggtgagagtggacgtgttctgtaaggtggataagaagggcaagaatcagtactttatcgtgcctatctatgcctggcaggtggccgagaacatcctgccagacatcgattgcaagggctacagaatcgacgatagctatacattctgtttttccctgcacaagtatgacctgatcgccttccagaaggatgagaagtccaaggtggagtttgcctactatatcaattgcgactcctctagcggcgggttctacctggcctggcacgataagggcagcagggagcagcggtttcgcatctccacccagaatctggcgctgatccagaagtatcaggtgaacgagctgggcaaggagatcaggccatgtcggctgaagaagcgcccacccgtgagcggcgggagcggcgggagcggggggagcactaatctgagcgacatcattgagaaggagactgggaaacagctggtcattcaggagtccatcctgatgctgcctgaggaggtggaggaagtgatcggcaacaagccagagtctgacatcctggtgcacaccgcctacgacgagtccacagatgagaatgtgatgctgctgacctctgacgcccccgagtataagccttgggccctggtcatccaggattctaacggcgagaataagatcaagatgctgagcggaggatccggaggatctggaggcagcaccaacctgtctgacatcatcgagaaggagacaggcaagcagctggtcatccaggagagcatcctgatgctgcccgaagaagtcgaagaagtgatcggaaacaagcctgagagcgatatcctggtccataccgcctacgacgagagtaccgacgaaaatgtgatgctgctgacatccgacgccccagagtataagccctgggctctggtcatccaggattccaacggagagaacaaaatcaaaatgctgtctggcggctcaaaaagaaccgccgacggcagcgaattcgagcccaagaagaagaggaaagtctaaccggtcatcatcaccatcaccattgagtttaaacccgctgatcagcctcgactgtgccttctagttgccagccatctgttgtttgcccctcccccgtgccttccttgaccctggaaggtgccactcccactgtcctttcctaataaaatgaggaaattgcatcgcattgtctgagtaggtgtcattctattctggggggtggggtggggcaggacagcaagggggaggattgggaagacaatagcaggcatgctggggatgcggtgggctctatggcttctgaggcggaaagaaccagctggggctcgataccgtcgacctctagctagagcttggcgtaatcatggtcatagctgtttcctgtgtgaaattgttatccgctcacaattccacacaacatacgagccggaagcataaagtgtaaagcctagggtgcctaatgagtgagctaactcacattaattgcgttgcgctcactgcccgctttccagtcgggaaacctgtcgtgccagctgcattaatgaatcggccaacgcgcggggagaggcggtttgcgtattgggcgcacttccgcttcctcgctcactgactcgctgcgctcggtcgttcggctgcggcgagcggtatcagctcactcaaaggcggtaatacggttatccacagaatcaggggataacgcaggaaagaacatgtgagcaaaaggccagcaaaaggccaggaaccgtaaaaaggccgcgttgctggcgtttttccataggctccgcccccctgacgagcatcacaaaaatcgacgctcaagtcagaggtggcgaaacccgacaggactataaagataccaggcgtttccccctggaagctccctcgtgcgctctcctgttccgaccctgccgcttaccggatacctgtccgcctttctcccttcgggaagcgtggcgctttctcatagctcacgctgtaggtatctcagttcggtgtaggtcgttcgctccaagctgggctgtgtgcacgaaccccccgttcagcccgaccgctgcgccttatccggtaactatcgtcttgagtccaacccggtaagacacgacttatcgccactggcagcagccactggtaacaggattagcagagcgaggtatgtaggcggtgctacagagttcttgaagtggtggcctaactacggctacactagaagaacagtatttggtatctgcgctctgctgaagccagttaccttcggaaaaagagttggtagctcttgatccggcaaacaaaccaccgctggtagcggtggtttttttgtttgcaagcagcagattacgcgcagaaaaaaaggatctcaagaagatcctttgatcttttctacggggtctgacactcagtggaacgaaaactcacgttaagggattttggtcatgagattatcaaaaaggatcttcacctagatccttttaaattaaaaatgaagttttaaatcaatctaaagtatatatgagtaaacttggtctgacagttaccaatgcttaatcagtgaggcacctatctcagcgatctgtctatttcgttcatccatagttgcctgactccccgtcgtgtagataactacgatacgggagggcttaccatctggccccagtgctgcaatgataccgcgggacccacgctcaccggctccagatttatcagcaataaaccagccagccggaagggccgagcgcagaagtggtcctgcaactttatccgcctccatccagtctattaattgttgccgggaagctagagtaagtagttcgccagttaatagtttgcgcaacgttgttgccattgctacaggcatcgtggtgtcacgctcgtcgtttggtatggcttcattcagctccggttcccaacgatcaaggcgagttacatgatcccccatgttgtgcaaaaaagcggttagctccttcggtcctccgatcgttgtcagaagtaagttggccgcagtgttatcactcatggttatggcagcactgcataattctcttactgtcatgccatccgtaagatgcttttctgtgactggtgagtactcaaccaagtcattctgagaatagtgtatgcggcgaccgagttgctcttgcccggcgtcaatacgggataataccgcgccacatagcagaactttaaaagtgctcatcattggaaaacgttcttcggggcgaaaactctcaaggatcttaccgctgttgagatccagttcgatgtaacccactcgtgcacccaactgatcttcagcatcttttactttcaccagcgtttctgggtgagcaaaaacaggaaggcaaaatgccgcaaaaaagggaataagggcgacacggaaatgttgaatactcatactcttcctttttcaatattattgaagcatttatcagggttattgtctcatgagcggatacatatttgaatgtatttagaaaaataaacaaataggggttccgcgcacatttccccgaaaagtgccacctgacgtcgacggatcgggagatcgatctcccgatcccctagggtcgactctcagtacaatctgctctgatgccgcatagttaagccagtatctgctccctgcttgtgtgttggaggtcgctgagtagtgcgcgagcaaaatttaagctacaacaaggcaaggcttgaccgacaattgcatgaagaatctgcttagggttaggcgttttgcgctgcttcgcgatgtacgggccagatatacgcgttgacattgattattgac

SEQ ID NO: 3654 - DNA, 7347 bp, synthetic construct
  source 1..7347: mol_type = other DNA
attgatgcagtaatcatagcctacgctaacaacagcatcgtgaaagccttctccgatttcaagaaagaacaggagtctaatagcgccgagttgtacgccaagaaaatttccgaattggactataaaaataagagaaaattcttcgaacccttctccgggtttcgccaaaaggtcttagataagatcgacgagattttcgtttccaagcccgaaagaaaaaagccttcaggggcactgcacgaagagacattccgcaaggaagaggaattttaccaatcttacggtggtaaagagggagttctgaaggctctggagcttgggaagatccgcaaggtaaacgggaaaatcgtgaaaaacggggacatgttcagggtggatatcttcaagcacaaaaagaccaacaagttctacgcagtacccatctacactatggatttcgctttaaaggttctcccaaataaggcggtggctcgatcgaagaaaggagagatcaaggactggatcttaatggatgaaaattacgagttttgcttctcgctctacaaagatagcctgattctgatccagacaaaaaagatgcaggaaccagaatttgtttattataacgccttcacgagcagtacagtgtccctgattgtgagcaagcatgataacaagttcgagactctgtctaagaatcagaaaatccttttcaagaacgccaacgagaaggaggtcatcgcaaagtcaattggcatccaaaacctgaaggtgttcgagaaatacatagtgtccgcactcggtgaagtaactaaagccgaatttcgacagcgcgaggattttaagaaaagcggcgggagcggcgggagcggggggagcactaatctgagcgacatcattgagaaggagactgggaaacagctggtcattcaggagtccatcctgatgctgcctgaggaggtggaggaagtgatcggcaacaagccagagtctgacatcctggtgcacaccgcctacgacgagtccacagatgagaatgtgatgctgctgacctctgacgcccccgagtataagccttgggccctggtcatccaggattctaacggcgagaataagatcaagatgctgagcggaggatccaaaagaaccgccgacggcagcgaattcgagcccaagaagaagaggaaagtctaaccggtcatcatcaccatcaccattgagtttaaacccgctgatcagcctcgactgtgccttctagttgccagccatctgttgtttgcccctcccccgtgccttccttgaccctggaaggtgccactcccactgtcctttcctaataaaatgaggaaattgcatcgcattgtctgagtaggtgtcattctattctggggggtggggtggggcaggacagcaagggggaggattgggaagacaatagcaggcatgctggggatgcggtgggctctatggcttctgaggcggaaagaaccagctggggctcgataccgtcgacctctagctagagcttggcgtaatcatggtcatagctgtttcctgtgtgaaattgttatccgctcacaattccacacaacatacgagccggaagcataaagtgtaaagcctagggtgcctaatgagtgagctaactcacattaattgcgttgcgctcactgcccgctttccagtcgggaaacctgtcgtgccagctgcattaatgaatcggccaacgcgcggggagaggcggtttgcgtattgggcgcacttccgcttcctcgctcactgactcgctgcgctcggtcgttcggctgcggcgagcggtatcagctcactcaaaggcggtaatacggttatccacagaatcaggggataacgcaggaaagaacatgtgagcaaaaggccagcaaaaggccaggaaccgtaaaaaggccgcgttgctggcgtttttccataggctccgcccccctgacgagcatcacaaaaatcgacgctcaagtcagaggtggcgaaacccgacaggactataaagataccaggcgtttccccctggaagctccctcgtgcgctctcctgttccgaccctgccgcttaccggatacctgtccgcctttctcccttcgggaagcgtggcgctttctcatagctcacgctgtaggtatctcagttcggtgtaggtcgttcgctccaagctgggctgtgtgcacgaaccccccgttcagcccgaccgctgcgccttatccggtaactatcgtcttgagtccaacccggtaagacacgacttatcgccactggcagcagccactggtaacaggattagcagagcgaggtatgtaggcggtgctacagagttcttgaagtggtggcctaactacggctacactagaagaacagtatttggtatctgcgctctgctgaagccagttaccttcggaaaaagagttggtagctcttgatccggcaaacaaaccaccgctggtagcggtggtttttttgtttgcaagcagcagattacgcgcagaaaaaaaggatctcaagaagatcctttgatcttttctacggggtctgacactcagtggaacgaaaactcacgttaagggattttggtcatgagattatcaaaaaggatcttcacctagatccttttaaattaaaaatgaagttttaaatcaatctaaagtatatatgagtaaacttggtctgacagttaccaatgcttaatcagtgaggcacctatctcagcgatctgtctatttcgttcatccatagttgcctgactccccgtcgtgtagataactacgatacgggagggcttaccatctggccccagtgctgcaatgataccgcgggacccacgctcaccggctccagatttatcagcaataaaccagccagccggaagggccgagcgcagaagtggtcctgcaactttatccgcctccatccagtctattaattgttgccgggaagctagagtaagtagttcgccagttaatagtttgcgcaacgttgttgccattgctacaggcatcgtggtgtcacgctcgtcgtttggtatggcttcattcagctccggttcccaacgatcaaggcgagttacatgatcccccatgttgtgcaaaaaagcggttagctccttcggtcctccgatcgttgtcagaagtaagttggccgcagtgttatcactcatggttatggcagcactgcataattctcttactgtcatgccatccgtaagatgcttttctgtgactggtgagtactcaaccaagtcattctgagaatagtgtatgcggcgaccgagttgctcttgcccggcgtcaatacgggataataccgcgccacatagcagaactttaaaagtgctcatcattggaaaacgttcttcggggcgaaaactctcaaggatcttaccgctgttgagatccagttcgatgtaacccactcgtgcacccaactgatcttcagcatcttttactttcaccagcgtttctgggtgagcaaaaacaggaaggcaaaatgccgcaaaaaagggaataagggcgacacggaaatgttgaatactcatactcttcctttttcaatattattgaagcatttatcagggttattgtctcatgagcggatacatatttgaatgtatttagaaaaataaacaaataggggttccgcgcacatttccccgaaaagtgccacctgacgtcgacggatcgggagatcgatctcccgatcccctagggtcgactctcagtacaatctgctctgatgccgcatagttaagccagtatctgctccctgcttgtgtgttggaggtcgctgagtagtgcgcgagcaaaatttaagctacaacaaggcaaggcttgaccgacaattgcatgaagaatctgcttagggttaggcgttttgcgctgcttcgcgatgtacgggccagatatacgcgttgacattgattattgactagttattaatagtaatcaattacggggtcattagttcatagcccatatatggagttccgcgttacataacttacggtaaatggcccgcctggctgaccgcccaacgacccccgcccattgacgtcaataatgacgtatgttcccatagtaacgccaatagggactttccattgacgtcaatgggtggagtatttacggtaaactgcccacttggcagtacatcaagtgtatcatatgccaagtacgccccctattgacgtcaatgacggtaaatggcccgcctggcattatgcccagtacatgaccttatgggactttcctacttggcagtacatctacgtattagtcatcgctattaccatggtgatgcggttttggcagtacatcaatgggcgtggatagcggtttgactcacggggatttccaagtctccaccccattgacgtcaatgggagtttgttttggcaccaaaatcaacgggactttccaaaatgtcgtaacaactccgccccattgacgcaaatgggcggtaggcgtgtacggtgggaggtctatataagcagagctggtttagtgaaccgtcagatccgctagagatccgcggccgctaatacgactcactatagggagagccgccaccatgaaacggacagccgacggaagcgagttcgagtcaccaaagaagaagcggaaagtcagttctgaggtggagttttcccacgagtactggatgagacatgccctgaccctggccaagagggcacgggatgagggggcgggtcctgtgggagccgtgctggtgctgaacaatagagtgatcggcgagggctggaacagagccatcggcctgcacgacccaacagcccatgccgaaattatggccctgagacagggcggcctggtcatgcagaactacagactgtttgacgccaccctgtacgtgacattcgagccttgcgtgatgtgcgccggcgccatgatcaactctaggatcggccgcgtggtgtttggcgtgaggaactcaaaaagaggcgccgcaggctccctgatgaacgtgctgaactaccccggcatgaatcaccgcgtcgaaattaccgagggaatcctggcagatgaatgtgccgccctgctgtgcgatttctatcggatgcctagacaggtgttcaattctcagaagaaggcccagagctccatcaactctggcggatctagcggaggatcctctggcagcgagacaccaggaacaagcgagtcagcaacaccagagagcagtggcggcagcagcggcggcagcgcccgcatcctcgctttcgcaatcggaatctctagtatcggatgggccttctctgaaaacgacgaactgaaagactgcggcgtgagaatcttcacaaaggttgaaaaccctaaaacaggcgagtctttagctctgccacgtaggttggcccgctccgcccgaaaaaggtatgctcggcggaaggctcgcctcaaccacttgaagcatttgatagctaatgagttcaaactgaactacgaagattaccagtccttcgacgagtcattggcaaaagcctacaaaggcagccttatcagtccttatgagttgagatttcgcgcactcaacgaactgctttctaagcaagactttgctagggtcattctgcacatcgcaaaacggcgaggttatgacgatatcaagaactccgacgataaagaaaagggagccattctcaaggcgatcaaacagaatgaggaaaaattggcaaactaccagagtgtgggcgagtatctgtataaagagtatttccagaagtttaaggaaaacagcaaggagtttacaaacgtcagaaataaaaaggagtcttacgagagatgcatcgcgcagtcattcctcaaagatgagctgaagctgatatttaagaagcaacgcgaatttggtttctcattctctaagaagttcgaagaggaggttctttccgtggcgttttacaagagggcgctcaaagacttctcccacctggttggtaactgtagtttcttcacggatgagaagcgagctcccaaaaattctcccctggctttcatgtttgttgccctgactcggatcattaacctgctgaacaacctgaaaaatactgaagggatcttgtatacgaaggacgacctaaatgcactcctgaatgaagtgctcaaaaacggaactctaacctataaacagaccaagaaattactggggctctctgacgactacgagttcaagggcgagaagggtacttattttatcgaattcaaaaagtataaggagttcattaaagcattgggggaacacaacctcagccaggacgatctcaatgaaattgccaaggacatcacgctgattaaagacgagataaaactgaaaaaggcactggccaagtatgacctcaaccagaaccagatcgactctctgtccaagctggagttcaaagaccacctaaacatatccttcaaagccctgaaactggtcacccctctaatgctcgaaggaaaaaaatacgacgaggcgtgtaatgaactgaatcttaaggtggccatcaatgaggataagaaggactttcttccagcctttaacgagacatattacaaagacgaggtcacaaacccggttgtgctgagggccataaaagagtatcggaaggttctgaatgccctcctgaagaagtacggcaaagtgcacaaaataaatatcgaattggctagggaggtggggaagaaccattctcagcgagcaaagatcgagaaagagcagaatgagaactacaaagccaagaaagacgccgaactggagtgcgaaaagctggggcttaaaataaacagtaaaaacatcctgaaattaagattgttcaaagagcaaaaggagttttgcgcctactcaggggaaaaaatcaaaatatcagacctgcaggacgagaaaatgctggagatcgaccatatctatccgtatagcaggtcatttgacgattcctacatgaacaaagtgcttgtgtttaccaaacagaaccaagaaaagctgaaccaaaccccctttgaggctttcggaaacgactcagccaagtggcagaaaatcgaagtcctagccaagaatctgcctacaaaaaaacaaaagaggattcttgataagaactataaggacaaggaacagaaaaactttaaagacaggaacctgaatgacacgaggtacattgcgcgactggttctaaactataccaaagactacctggatttcctccctctgagcgacgacgagaatactaaactgaatgatacccagaaaggctcaaaggtccacgttgaggctaagtccgggatgctgactagcgccctccgccacacgtggggcttcagcgccaaagatcggaataatcatcttcatcacgct

SEQ ID NO: 3655 - DNA, 8778 bp, synthetic construct
  source 1..8778: mol_type = other DNA
tagttattaatagtaatcaattacggggtcattagttcatagcccatatatggagttccgcgttacataacttacggtaaatggcccgcctggctgaccgcccaacgacccccgcccattgacgtcaataatgacgtatgttcccatagtaacgccaatagggactttccattgacgtcaatgggtggagtatttacggtaaactgcccacttggcagtacatcaagtgtatcatatgccaagtacgccccctattgacgtcaatgacggtaaatggcccgcctggcattatgcccagtacatgaccttatgggactttcctacttggcagtacatctacgtattagtcatcgctattaccatggtgatgcggttttggcagtacatcaatgggcgtggatagcggtttgactcacggggatttccaagtctccaccccattgacgtcaatgggagtttgttttggcaccaaaatcaacgggactttccaaaatgtcgtaacaactccgccccattgacgcaaatgggcggtaggcgtgtacggtgggaggtctatataagcagagctggtttagtgaaccgtcagatccgctagagatccgcggccgctaatacgactcactatagggagagccgccaccatgaaacggacagccgacggaagcgagttcgagtcaccaaagaagaagcggaaagtcagttctgaggtggagttttcccacgagtactggatgagacatgccctgaccctggccaagagggcacgggatgagggggcgggtcctgtgggagccgtgctggtgctgaacaatagagtgatcggcgagggctggaacagagccatcggcctgcacgacccaacagcccatgccgaaattatggccctgagacagggcggcctggtcatgcagaactacagactgtttgacgccaccctgtacgtgacattcgagccttgcgtgatgtgcgccggcgccatgatcaactctaggatcggccgcgtggtgtttggcgtgaggaactcaaaaagaggcgccgcaggctccctgatgaacgtgctgaactaccccggcatgaatcaccgcgtcgaaattaccgagggaatcctggcagatgaatgtgccgccctgctgtgcgatttctatcggatgcctagacaggtgttcaattctcagaagaaggcccagagctccatcaactctggcggatctagcggaggatcctctggcagcgagacaccaggaacaagcgagtcagcaacaccagagagcagtggcggcagcagcggcggcagcgacaagaagtacagcatcggcctggccatcggcaccaactctgtgggctgggccgtgatcaccgacgagtacaaggtgcccagcaagaaattcaaggtgctgggcaacaccgaccggcacagcatcaagaagaacctgatcggagccctgctgttcgacagcggcgaaacagccgaggccacccggctgaagagaaccgccagaagaagatacaccagacggaagaaccggatctgctatctgcaagagatcttcagcaacgagatggccaaggtggacgacagcttcttccacagactggaagagtccttcctggtggaagaggataagaagcacgagcggcaccccatcttcggcaacatcgtggacgaggtggcctaccacgagaagtaccccaccatctaccacctgagaaagaaactggtggacagcaccgacaaggccgacctgcggctgatctatctggccctggcccacatgatcaagttccggggccacttcctgatcgagggcgacctgaaccccgacaacagcgacgtggacaagctgttcatccagctggtgcagacctacaaccagctgttcgaggaaaaccccatcaacgccagcggcgtggacgccaaggccatcctgtctgccagactgagcaagagcagacggctggaaaatctgatcgcccagctgcccggcgagaagaagaatggcctgttcggaaacctgattgccctgagcctgggcctgacccccaacttcaagagcaacttcgacctggccgaggatgccaaactgcagctgagcaaggacacctacgacgacgacctggacaacctgctggcccagatcggcgaccagtacgccgacctgtttctggccgccaagaacctgtccgacgccatcctgctgagcgacatcctgagagtgaacaccgagatcaccaaggcccccctgagcgcctctatgatcaagagatacgacgagcaccaccaggacctgaccctgctgaaagctctcgtgcggcagcagctgcctgagaagtacaaagagattttcttcgaccagagcaagaacggctacgccggctacattgacggcggagccagccaggaagagttctacaagttcatcaagcccatcctggaaaagatggacggcaccgaggaactgctcgtgaagctgaacagagaggacctgctgcggaagcagcggaccttcgacaacggcagcatcccccaccagatccacctgggagagctgcacgccattctgcggcggcaggaagatttttacccattcctgaaggacaaccgggaaaagatcgagaagatcctgaccttccgcatcccctactacgtgggccctctggccaggggaaacagcagattcgcctggatgaccagaaagagcgaggaaaccatcaccccctggaacttcgaggaagtggtggacaagggcgcttccgcccagagcttcatcgagcggatgaccaacttcgataagaacctgcccaacgagaaggtgctgcccaagcacagcctgctgtacgagtacttcaccgtgtataacgagctgaccaaagtgaaatacgtgaccgagggaatgagaaagcccgccttcctgagcggcgagcagaaaaaggccatcgtggacctgctgttcaagaccaaccggaaagtgaccgtgaagcagctgaaagaggactacttcaagaaaatcgagtgcttcgactccgtggaaatctccggcgtggaagatcggttcaacgcctccctgggcacataccacgatctgctgaaaattatcaaggacaaggacttcctggacaatgaggaaaacgaggacattctggaagatatcgtgctgaccctgacactgtttgaggacagagagatgatcgaggaacggctgaaaacctatgcccacctgttcgacgacaaagtgatgaagcagctgaagcggcggagatacaccggctggggcaggctgagccggaagctgatcaacggcatccgggacaagcagtccggcaagacaatcctggatttcctgaagtccgacggcttcgccaacagaaacttcatgcagctgatccacgacgacagcctgacctttaaagaggacatccagaaagcccaggtgtccggccagggcgatagcctgcacgagcacattgccaatctggccggcagccccgccattaagaagggcatcctgcagacagtgaaggtggtggacgagctcgtgaaagtgatgggccggcacaagcccgagaacatcgtgatcgaaatggccagagagaaccagaccacccagaagggacagaagaacagccgcgagagaatgaagcggatcgaagagggcatcaaagagctgggcagccagatcctgaaagaacaccccgtggaaaacacccagctgcagaacgagaagctgtacctgtactacctgcagaatgggcgggatatgtacgtggaccaggaactggacatcaaccggctgtccgactacgatgtggaccatatcgtgcctcagagctttctgaaggacgactccatcgacaacaaggtgctgaccagaagcgacaagaaccggggcaagagcgacaacgtgccctccgaagaggtcgtgaagaagatgaagaactactggcggcagctgctgaacgccaagctgattacccagagaaagttcgacaatctgaccaaggccgagagaggcggcctgagcgaactggataaggccggcttcatcaagagacagctggtggaaacccggcagatcacaaagcacgtggcacagatcctggactcccggatgaacactaagtacgacgagaatgacaagctgatccgggaagtgaaagtgatcaccctgaagtccaagctggtgtccgatttccggaaggatttccagttttacaaagtgcgcgagatcaacaactaccaccacgcccacgacgcctacctgaacgccgtcgtgggaaccgccctgatcaaaaagtaccctaagctggaaagcgagttcgtgtacggcgactacaaggtgtacgacgtgcggaagatgatcgccaagagcgagcaggaaatcggcaaggctaccgccaagtacttcttctacagcaacatcatgaactttttcaagaccgagattaccctggccaacggcgagatccggaagcggcctctgatcgagacaaacggcgaaaccggggagatcgtgtgggataagggccgggattttgccaccgtgcggaaagtgctgagcatgccccaagtgaatatcgtgaaaaagaccgaggtgcagacaggcggcttcagcaaagagtctatcctgcccaagaggaacagcgataagctgatcgccagaaagaaggactgggaccctaagaagtacggcggcttcgacagccccaccgtggcctattctgtgctggtggtggccaaagtggaaaagggcaagtccaagaaactgaagagtgtgaaagagctgctggggatcaccatcatggaaagaagcagcttcgagaagaatcccatcgactttctggaagccaagggctacaaagaagtgaaaaaggacctgatcatcaagctgcctaagtactccctgttcgagctggaaaacggccggaagagaatgctggcctctgccggcgaactgcagaagggaaacgaactggccctgccctccaaatatgtgaacttcctgtacctggccagccactatgagaagctgaagggctcccccgaggataatgagcagaaacagctgtttgtggaacagcacaagcactacctggacgagatcatcgagcagatcagcgagttctccaagagagtgatcctggccgacgctaatctggacaaagtgctgtccgcctacaacaagcaccgggataagcccatcagagagcaggccgagaatatcatccacctgtttaccctgaccaatctgggagcccctgccgccttcaagtactttgacaccaccatcgaccggaagaggtacaccagcaccaaagaggtgctggacgccaccctgatccaccagagcatcaccggcctgtacgagacacggatcgacctgtctcagctgggaggtgacagcggcgggagcggcgggagcggggggagcactaatctgagcgacatcattgagaaggagactgggaaacagctggtcattcaggagtccatcctgatgctgcctgaggaggtggaggaagtgatcggcaacaagccagagtctgacatcctggtgcacaccgcctacgacgagtccacagatgagaatgtgatgctgctgacctctgacgcccccgagtataagccttgggccctggtcatccaggattctaacggcgagaataagatcaagatgctgagcggaggatccggaggatctggaggcagcaccaacctgtctgacatcatcgagaaggagacaggcaagcagctggtcatccaggagagcatcctgatgctgcccgaagaagtcgaagaagtgatcggaaacaagcctgagagcgatatcctggtccataccgcctacgacgagagtaccgacgaaaatgtgatgctgctgacatccgacgccccagagtataagccctgggctctggtcatccaggattccaacggagagaacaaaatcaaaatgctgtctggcggctcaaaaagaaccgccgacggcagcgaattcgagcccaagaagaagaggaaagtctaaccggtcatcatcaccatcaccattgagtttaaacccgctgatcagcctcgactgtgccttctagttgccagccatctgttgtttgcccctcccccgtgccttccttgaccctggaaggtgccactcccactgtcctttcctaataaaatgaggaaattgcatcgcattgtctgagtaggtgtcattctattctggggggtggggtggggcaggacagcaagggggaggattgggaagacaatagcaggcatgctggggatgcggtgggctctatggcttctgaggcggaaagaaccagctggggctcgataccgtcgacctctagctagagcttggcgtaatcatggtcatagctgtttcctgtgtgaaattgttatccgctcacaattccacacaacatacgagccggaagcataaagtgtaaagcctagggtgcctaatgagtgagctaactcacattaattgcgttgcgctcactgcccgctttccagtcgggaaacctgtcgtgccagctgcattaatgaatcggccaacgcgcgggaagaggcggtttgcgtattgggcgcacttccgcttcctcgctcactgactcgctgcgctcggtcgttcggctgcggcgagcggtatcagctcactcaaaggcggtaatacggttatccacagaatcaggggataacgcaggaaagaacatgtgagcaaaaggccagcaaaaggccaggaaccgtaaaaaggccgcgttgctggcgtttttccataggctccgcccccctgacgagcatcacaaaaatcgacgctcaagtcagaggtggcgaaacccgacaggactataaagataccaggcgtttccccctggaagctccctcgtgcgctctcctgttccgaccctgccgcttaccggatacctgtccgcctttctcccttcgggaagcgtggcgctttctcatagctcacgctgtaggtatctcagttcggtgtaggtcgttcgctccaagctgggctgtgtgcacgaaccccccgttcagcccgaccgctgcgccttatccggtaactatcgtcttgagtccaacccggtaagacacgacttatcgccactggcagcagccactggtaacaggattagcagagcgaggtatgtaggcggtgctacagagttcttgaagtggtggcctaactacggctacactagaagaacagtatttggtatctgcgctctgctgaagccagttaccttcggaaaaagagttggtagctcttgatccggcaaacaaaccaccgctggtagcggtggtttttttgtttgcaagcagcagattacgcgcagaaaaaaaggatctcaagaaaatcctttgatcttttctacggggtctgacactcagtggaacgaaaactcacgttaagggattttggtcatgagattatcaaaaaggatcttcacctagatccttttaaattaaaaatgaagttttaaatcaatctaaagtatatatgagtaaacttggtctgacagttaccaatgcttaatcagtgaggcacctatctcagcgatctgtctatttcgttcatccatagttgcctgactccccgtcgtgtagataactacgatacgggagggcttaccatctggccccagtgctgcaatgataccgcgggacccacgctcaccggctccagatttatcagcaataaaccagccagccggaagggccgagcgcagaagtggtcctgcaactttatccgcctccatccagtctattaattgttgccgggaagctagagtaagtagttcgccagttaatagtttgcgcaacgttgttgccattgctacaggcatcgtggtgtcacgctcgtcgtttggtatggcttcattcagctccggttcccaacgatcaaggcgagttacatgatcccccatgttgtgcaaaaaagcggttagctccttcggtcctccgatcgttgtcagaagtaagttggccgcagtgttatcactcatggttatggcagcactgcataattctcttactgtcatgccatccgtaagatgcttttctgtgactggtgagtactcaaccaagtcattctgagaatagtgtatgcggcgaccgagttgctcttgcccggcgtcaatacgggataataccgcgccacatagcagaactttaaaagtgctcatcattggaaaacgttcttcggggcgaaaactctcaaggatcttaccgctgttgagatccagttcgatgtaacccactcgtgcacccaactgatcttcagcatcttttactttcaccagcgtttctgggtgagcaaaaacaggaaggcaaaatgccgcaaaaaagggaataagggcgacacggaaatgttgaatactcatactcttcctttttcaatattattgaagcatttatcagggttattgtctcatgagcggatacatatttgaatgtatttagaaaaataaacaaataggggttccgcgcacatttccccgaaaagtgccacctgacgtcgacggatcgggagatcgatctcccgatcccctagggtcgactctcagtacaatctgctctgatgccgcatagttaagccagtatctgctccctgcttgtgtgttggaggtcgctgagtagtgcgcgagcaaaatttaagctacaacaaggcaaggcttgaccgacaattgcatgaagaatctgcttagggttaggcgttttgcgctgcttcgcgatgtacgggccagatatacgcgttgacattgattattgac

SEQ ID NO: 3656 - DNA, 7836 bp, synthetic construct
  source 1..7836: mol_type = other DNA
tagttattaatagtaatcaattacggggtcattagttcatagcccatatatggagttccgcgttacataacttacggtaaatggcccgcctggctgaccgcccaacgacccccgcccattgacgtcaataatgacgtatgttcccatagtaacgccaatagggactttccattgacgtcaatgggtggagtatttacggtaaactgcccacttggcagtacatcaagtgtatcatatgccaagtacgccccctattgacgtcaatgacggtaaatggcccgcctggcattatgcccagtacatgaccttatgggactttcctacttggcagtacatctacgtattagtcatcgctattaccatggtgatgcggttttggcagtacatcaatgggcgtggatagcggtttgactcacggggatttccaagtctccaccccattgacgtcaatgggagtttgttttggcaccaaaatcaacgggactttccaaaatgtcgtaacaactccgccccattgacgcaaatgggcggtaggcgtgtacggtgggaggtctatataagcagagctggtttagtgaaccgtcagatccgctagagatccgcggccgctaatacgactcactatagggagagccgccaccatgaaacggacagccgacggaagcgagttcgagtcaccaaagaagaagcggaaagtcagttctgaggtggagttttcccacgagtactggatgagacatgccctgaccctggccaagagggcacgggatgagggggcgggtcctgtgggagccgtgctggtgctgaacaatagagtgatcggcgagggctggaacagagccatcggcctgcacgacccaacagcccatgccgaaattatggccctgagacagggcggcctggtcatgcagaactacagactgtttgacgccaccctgtacgtgacattcgagccttgcgtgatgtgcgccggcgccatgatcaactctaggatcggccgcgtggtgtttggcgtgaggaactcaaaaagaggcgccgcaggctccctgatgaacgtgctgaactaccccggcatgaatcaccgcgtcgaaattaccgagggaatcctggcagatgaatgtgccgccctgctgtgcgatttctatcggatgcctagacaggtgttcaattctcagaagaaggcccagagctccatcaactctggcggatctagcggaggatcctctggcagcgagacaccaggaacaagcgagtcagcaacaccagagagcagtggcggcagcagcggcggcagcgggaagcgaaattacattctggggctggccattggcattacatcagtgggctatggcatcattgactacgagacaagggacgtgatcgacgccggcgtgagactgttcaaggaggccaacgtggagaacaatgagggccggagatccaagaggggagcaaggcgcctgaagcggagaaggcgccacagaatccagagagtgaagaagctgctgttcgattacaacctgctgaccgaccactccgagctgtctggcatcaatccttatgaggccagagtgaagggcctgtcccagaagctgtctgaggaggagtttagcgccgccctgctgcacctggcaaagaggagaggcgtgcacaacgtgaatgaggtggaggaggacaccggcaacgagctgtccacaaaggagcagatcagccgcaattccaaggccctggaggagaagtatgtggccgagctgcagctggagcggctgaagaaggatggcgaggtgaggggctccatcaatcgcttcaagacctctgactacgtgaaggaggccaagcagctgctgaaggtgcagaaggcctaccaccagctggatcagtcctttatcgatacatatatcgacctgctggagacaaggcgcacatactatgagggaccaggagagggctctcccttcggctggaaggacatcaaggagtggtacgagatgctgatgggccactgcacctattttccagaggagctgagaagcgtgaagtacgcctataacgccgatctgtacaacgccctgaatgacctgaacaacctggtcatcaccagggatgagaacgagaagctggagtactatgagaagttccagatcatcgagaacgtgttcaagcagaagaagaagcctacactgaagcagatcgccaaggagatcctggtgaacgaggaggacatcaagggctaccgcgtgacctccacaggcaagccagagttcaccaatctgaaggtgtatcacgatatcaaggacatcacagcccggaaggagatcatcgagaacgccgagctgctggatcagatcgccaagatcctgaccatctatcagagctccgaggacatccaggaggagctgaccaacctgaatagcgagctgacacaggaggagatcgagcagatcagcaatctgaagggctacaccggcacacacaacctgagcctgaaggccatcaatctgatcctggatgagctgtggcacacaaacgacaatcagatcgccatctttaaccggctgaagctggtgccaaagaaggtggacctgtcccagcagaaggagatcccaaccacactggtggacgatttcatcctgtctcccgtggtgaagcggagcttcatccagagcatcaaagtgatcaacgccatcatcaagaagtacggcctgcccaatgatatcatcatcgagctggccagggagaagaactccaaggacgcccagaagatgatcaatgagatgcagaagaggaaccgccagaccaatgagcggatcgaggagatcatcagaaccacaggcaaggagaacgccaagtacctgatcgagaagatcaagctgcacgatatgcaggagggcaagtgtctgtattctctggaggccatccctctggaggacctgctgaacaatccattcaactacgaggtggatcacatcatcccccggagcgtgagcttcgacaattcttttaacaataaggtgctggtgaagcaggaggagaacagcaagaagggcaataggacccctttccagtacctgtctagctccgattctaagatcagctacgagacattcaagaagcacatcctgaatctggccaagggcaagggccgcatcagcaagaccaagaaggagtacctgctggaggagcgggacatcaacagattctccgtgcagaaggacttcatcaaccggaatctggtggacaccagatacgccacacgcggcctgatgaatctgctgcggtcttatttcagagtgaacaatctggatgtgaaggtaaagagcatcaacggcggcttcacctcctttctgcggagaaagtggaagtttaagaaggagcgcaacaagggctataagcaccacgccgaggatgccctgatcatcgccaatgccgacttcatctttaaggagtggaagaagctggacaaggccaagaaagtgatggagaaccagatgttcgaggagaagcaggccgagagcatgcccgagatcgagacagagcaggagtacaaggagattttcatcacacctcaccagatcaagcacatcaaggacttcaaggactacaagtattctcacagggtggataagaagcccaaccgcgagctgatcaatgacaccctgtatagcacacggaaggacgataagggcaataccctgatcgtgaacaatctgaacggcctgtacgacaaggataatgacaagctgaagaagctgatcaacaagtctcccgagaagctgctgatgtaccaccacgatcctcagacatatcagaagctgaagctgatcatggagcagtacggcgacgagaagaacccactgtataagtactatgaggagacaggcaactacctgacaaagtatagcaagaaggataatggccccgtgatcaagaagatcaagtactatggcaacaagctgaatgcccacctggacatcaccgacgattaccctaactctcgcaataaggtggtgaagctgagcctgaagccataccggttcgacgtgtacctggacaacggcgtgtataagtttgtgacagtgaagaatctggatgtgatcaagaaggagaactactatgaggtgaacagcaagtgctacgaggaggccaagaagctgaagaagatcagcaaccaggccgagttcatcgcctctttttacaacaatgacctgatcaagatcaatggcgagctgtatagagtgatcggcgtgaacaatgatctgctgaacagaatcgaagtgaatatgatcgacatcacctacagggagtatctggagaacatgaatgataagaggccccctcgcatcatcaagaccatcgcctctaagacacagagcatcaagaagtacagcacagacatcctggggaacctgtatgaagtcaagagcaagaaacatcctcagattatcaagaaaggcagcggcgggagcggcgggagcggggggagcactaatctgagcgacatcattgagaaggagactgggaaacagctggtcattcaggagtccatcctgatgctgcctgaggaggtggaggaagtgatcggcaacaagccagagtctgacatcctggtgcacaccgcctacgacgagtccacagatgagaatgtgatgctgctgacctctgacgcccccgagtataagccttgggccctggtcatccaggattctaacggcgagaataagatcaagatgctgagcggaggatccggaggatctggaggcagcaccaacctgtctgacatcatcgagaaggagacaggcaagcagctggtcatccaggagagcatcctgatgctgcccgaagaagtcgaagaagtgatcggaaacaagcctgagagcgatatcctggtccataccgcctacgacgagagtaccgacgaaaatgtgatgctgctgacatccgacgccccagagtataagccctgggctctggtcatccaggattccaacggagagaacaaaatcaaaatgctgtctggcggctcaaaaagaaccgccgacggcagcgaattcgagcccaagaagaagaggaaagtctaaccggtcatcatcaccatcaccattgagtttaaacccgctgatcagcctcgactgtgccttctagttgccagccatctgttgtttgcccctcccccgtgccttccttgaccctggaaggtgccactcccactgtcctttcctaataaaatgaggaaattgcatcgcattgtctgagtaggtgtcattctattctggggggtggggtggggcaggacagcaagggggaggattgggaagacaatagcaggcatgctggggatgcggtgggctctatggcttctgaggcggaaagaaccagctggggctcgataccgtcgacctctagctagagcttggcgtaatcatggtcatagctgtttcctgtgtgaaattgttatccgctcacaattccacacaacatacgagccggaagcataaagtgtaaagcctagggtgcctaatgagtgagctaactcacattaattgcgttgcgctcactgcccgctttccagtcgggaaacctgtcgtgccagctgcattaatgaatcggccaacgcgcgggaagaggcggtttgcgtattgggcgcacttccgcttcctcgctcactgactcgctgcgctcggtcgttcggctgcggcgagcggtatcagctcactcaaaggcggtaatacggttatccacagaatcaggggataacgcaggaaagaacatgtgagcaaaaggccagcaaaaggccaggaaccgtaaaaaggccgcgttgctggcgtttttccataggctccgcccccctgacgagcatcacaaaaatcgacgctcaagtcagaggtggcgaaacccgacaggactataaagataccaggcgtttccccctggaagctccctcgtgcgctctcctgttccgaccctgccgcttaccggatacctgtccgcctttctcccttcgggaagcgtggcgctttctcatagctcacgctgtaggtatctcagttcggtgtaggtcgttcgctccaagctgggctgtgtgcacgaaccccccgttcagcccgaccgctgcgccttatccggtaactatcgtcttgagtccaacccggtaagacacgacttatcgccactggcagcagccactggtaacaggattagcagagcgaggtatgtaggcggtgctacagagttcttgaagtggtggcctaactacggctacactagaagaacagtatttggtatctgcgctctgctgaagccagttaccttcggaaaaagagttggtagctcttgatccggcaaacaaaccaccgctggtagcggtggtttttttgtttgcaagcagcagattacgcgcagaaaaaaaggatctcaagaaaatcctttgatcttttctacggggtctgacactcagtggaacgaaaactcacgttaagggattttggtcatgagattatcaaaaaggatcttcacctagatccttttaaattaaaaatgaagttttaaatcaatctaaagtatatatgagtaaacttggtctgacagttaccaatgcttaatcagtgaggcacctatctcagcgatctgtctatttcgttcatccatagttgcctgactccccgtcgtgtagataactacgatacgggagggcttaccatctggccccagtgctgcaatgataccgcgggacccacgctcaccggctccagatttatcagcaataaaccagccagccggaagggccgagcgcagaagtggtcctgcaactttatccgcctccatccagtctattaattgttgccgggaagctagagtaagtagttcgccagttaatagtttgcgcaacgttgttgccattgctacaggcatcgtggtgtcacgctcgtcgtttggtatggcttcattcagctccggttcccaacgatcaaggcgagttacatgatcccccatgttgtgcaaaaaagcggttagctccttcggtcctccgatcgttgtcagaagtaagttggccgcagtgttatcactcatggttatggcagcactgcataattctcttactgtcatgccatccgtaagatgcttttctgtgactggtgagtactcaaccaagtcattctgagaatagtgtatgcggcgaccgagttgctcttgcccggcgtcaatacgggataataccgcgccacatagcagaactttaaaagtgctcatcattggaaaacgttcttcggggcgaaaactctcaaggatcttaccgctgttgagatccagttcgatgtaacccactcgtgcacccaactgatcttcagcatcttttactttcaccagcgtttctgggtgagcaaaaacaggaaggcaaaatgccgcaaaaaagggaataagggcgacacggaaatgttgaatactcatactcttcctttttcaatattattgaagcatttatcagggttattgtctcatgagcggatacatatttgaatgtatttagaaaaataaacaaataggggttccgcgcacatttccccgaaaagtgccacctgacgtcgacggatcgggagatcgatctcccgatcccctagggtcgactctcagtacaatctgctctgatgccgcatagttaagccagtatctgctccctgcttgtgtgttggaggtcgctgagtagtgcgcgagcaaaatttaagctacaacaaggcaaggcttgaccgacaattgcatgaagaatctgcttagggttaggcgttttgcgctgcttcgcgatgtacgggccagatatacgcgttgacattgattattgac

SEQ ID NO: 3657 - DNA, 8778 bp, synthetic construct
  source 1..8778: mol_type = other DNA
tagttattaatagtaatcaattacggggtcattagttcatagcccatatatggagttccgcgttacataacttacggtaaatggcccgcctggctgaccgcccaacgacccccgcccattgacgtcaataatgacgtatgttcccatagtaacgccaatagggactttccattgacgtcaatgggtggagtatttacggtaaactgcccacttggcagtacatcaagtgtatcatatgccaagtacgccccctattgacgtcaatgacggtaaatggcccgcctggcattatgcccagtacatgaccttatgggactttcctacttggcagtacatctacgtattagtcatcgctattaccatggtgatgcggttttggcagtacatcaatgggcgtggatagcggtttgactcacggggatttccaagtctccaccccattgacgtcaatgggagtttgttttggcaccaaaatcaacgggactttccaaaatgtcgtaacaactccgccccattgacgcaaatgggcggtaggcgtgtacggtgggaggtctatataagcagagctggtttagtgaaccgtcagatccgctagagatccgcggccgctaatacgactcactatagggagagccgccaccatgaaacggacagccgacggaagcgagttcgagtcaccaaagaagaagcggaaagtcagttctgaggtggagttttcccacgagtactggatgagacatgccctgaccctggccaagagggcacgggatgagggggcgggtcctgtgggagccgtgctggtgctgaacaatagagtgatcggcgagggctggaacagagccatcggcctgcacgacccaacagcccatgccgaaattatggccctgagacagggcggcctggtcatgcagaactacagactgtttgacgccaccctgtacgtgacattcgagccttgcgtgatgtgcgccggcgccatgatcaactctaggatcggccgcgtggtgtttggcgtgaggaactcaaaaagaggcgccgcaggctccctgatgaacgtgctgaactaccccggcatgaatcaccgcgtcgaaattaccgagggaatcctggcagatgaatgtgccgccctgctgtgcgatttctatcggatgcctagacaggtgttcaattctcagaagaaggcccagagctccatcaactctggcggatctagcggaggatcctctggcagcgagacaccaggaacaagcgagtcagcaacaccagagagcagtggcggcagcagcggcggcagcgacaagaagtacagcatcggcctggccatcggcaccaactctgtgggctgggccgtgatcaccgacgagtacaaggtgcccagcaagaaattcaaggtgctgggcaacaccgaccggcacagcatcaagaagaacctgatcggagccctgctgttcgacagcggcgaaacagccgaggccacccggctgaagagaaccgccagaagaagatacaccagacggaagaaccggatctgctatctgcaagagatcttcagcaacgagatggccaaggtggacgacagcttcttccacagactggaagagtccttcctggtggaagaggataagaagcacgagcggcaccccatcttcggcaacatcgtggacgaggtggcctaccacgagaagtaccccaccatctaccacctgagaaagaaactggtggacagcaccgacaaggccgacctgcggctgatctatctggccctggcccacatgatcaagttccggggccacttcctgatcgagggcgacctgaaccccgacaacagcgacgtggacaagctgttcatccagctggtgcagacctacaaccagctgttcgaggaaaaccccatcaacgccagcggcgtggacgccaaggccatcctgtctgccagactgagcaagagcagacggctggaaaatctgatcgcccagctgcccggcgagaagaagaatggcctgttcggaaacctgattgccctgagcctgggcctgacccccaacttcaagagcaacttcgacctggccgaggatgccaaactgcagctgagcaaggacacctacgacgacgacctggacaacctgctggcccagatcggcgaccagtacgccgacctgtttctggccgccaagaacctgtccgacgccatcctgctgagcgacatcctgagagtgaacaccgagatcaccaaggcccccctgagcgcctctatgatcaagagatacgacgagcaccaccaggacctgaccctgctgaaagctctcgtgcggcagcagctgcctgagaagtacaaagagattttcttcgaccagagcaagaacggctacgccggctacattgacggcggagccagccaggaagagttctacaagttcatcaagcccatcctggaaaagatggacggcaccgaggaactgctcgtgaagctgaacagagaggacctgctgcggaagcagcggaccttcgacaacggcagcatcccccaccagatccacctgggagagctgcacgccattctgcggcggcaggaagatttttacccattcctgaaggacaaccgggaaaagatcgagaagatcctgaccttccgcatcccctactacgtgggccctctggccaggggaaacagcagattcgcctggatgaccagaaagagcgaggaaaccatcaccccctggaacttcgaggaagtggtggacaagggcgcttccgcccagagcttcatcgagcggatgaccaacttcgataagaacctgcccaacgagaaggtgctgcccaagcacagcctgctgtacgagtacttcaccgtgtataacgagctgaccaaagtgaaatacgtgaccgagggaatgagaaagcccgccttcctgagcggcgagcagaaaaaggccatcgtggacctgctgttcaagaccaaccggaaagtgaccgtgaagcagctgaaagaggactacttcaagaaaatcgagtgcttcgactccgtggaaatctccggcgtggaagatcggttcaacgcctccctgggcacataccacgatctgctgaaaattatcaaggacaaggacttcctggacaatgaggaaaacgaggacattctggaagatatcgtgctgaccctgacactgtttgaggacagagagatgatcgaggaacggctgaaaacctatgcccacctgttcgacgacaaagtgatgaagcagctgaagcggcggagatacaccggctggggcaggctgagccggaagctgatcaacggcatccgggacaagcagtccggcaagacaatcctggatttcctgaagtccgacggcttcgccaacagaaacttcatgcagctgatccacgacgacagcctgacctttaaagaggacatccagaaagcccaggtgtccggccagggcgatagcctgcacgagcacattgccaatctggccggcagccccgccattaagaagggcatcctgcagacagtgaaggtggtggacgagctcgtgaaagtgatgggccggcacaagcccgagaacatcgtgatcgaaatggccagagagaaccagaccacccagaagggacagaagaacagccgcgagagaatgaagcggatcgaagagggcatcaaagagctgggcagccagatcctgaaagaacaccccgtggaaaacacccagctgcagaacgagaagctgtacctgtactacctgcagaatgggcgggatatgtacgtggaccaggaactggacatcaaccggctgtccgactacgatgtggaccatatcgtgcctcagagctttctgaaggacgactccatcgacaacaaggtgctgaccagaagcgacaagaaccggggcaagagcgacaacgtgccctccgaagaggtcgtgaagaagatgaagaactactggcggcagctgctgaacgccaagctgattacccagagaaagttcgacaatctgaccaaggccgagagaggcggcctgagcgaactggataaggccggcttcatcaagagacagctggtggaaacccggcagatcacaaagcacgtggcacagatcctggactcccggatgaacactaagtacgacgagaatgacaagctgatccgggaagtgaaagtgatcaccctgaagtccaagctggtgtccgatttccggaaggatttccagttttacaaagtgcgcgagatcaacaactaccaccacgcccacgacgcctacctgaacgccgtcgtgggaaccgccctgatcaaaaagtaccctaagctggaaagcgagttcgtgtacggcgactacaaggtgtacgacgtgcggaagatgatcgccaagagcgagcaggaaatcggcaaggctaccgccaagtacttcttctacagcaacatcatgaactttttcaagaccgagattaccctggccaacggcgagatccggaagcggcctctgatcgagacaaacggcgaaaccggggagatcgtgtgggataagggccgggattttgccaccgtgcggaaagtgctgagcatgccccaagtgaatatcgtgaaaaagaccgaggtgcagacaggcggcttcagcaaagagtctatccggcccaagaggaacagcgataagctgatcgccagaaagaaggactgggaccctaagaagtacggcggcttcgtgagccccaccgtggcctattctgtgctggtggtggccaaagtggaaaagggcaagtccaagaaactgaagagtgtgaaagagctgctggggatcaccatcatggaaagaagcagcttcgagaagaatcccatcgactttctggaagccaagggctacaaagaagtgaaaaaggacctgatcatcaagctgcctaagtactccctgttcgagctggaaaacggccggaagagaatgctggcctctgcccggttcctgcagaagggaaacgaactggccctgccctccaaatatgtgaacttcctgtacctggccagccactatgagaagctgaagggctcccccgaggataatgagcagaaacagctgtttgtggaacagcacaagcactacctggacgagatcatcgagcagatcagcgagttctccaagagagtgatcctggccgacgctaatctggacaaagtgctgtccgcctacaacaagcaccgggataagcccatcagagagcaggccgagaatatcatccacctgtttaccctgaccaatctgggagcccctcgggccttcaagtactttgacaccaccatcgaccggaaggtgtaccggagcaccaaagaggtgctggacgccaccctgatccaccagagcatcaccggcctgtacgagacacggatcgacctgtctcagctgggaggtgacagcggcgggagcggcgggagcggggggagcactaatctgagcgacatcattgagaaggagactgggaaacagctggtcattcaggagtccatcctgatgctgcctgaggaggtggaggaagtgatcggcaacaagccagagtctgacatcctggtgcacaccgcctacgacgagtccacagatgagaatgtgatgctgctgacctctgacgcccccgagtataagccttgggccctggtcatccaggattctaacggcgagaataagatcaagatgctgagcggaggatccggaggatctggaggcagcaccaacctgtctgacatcatcgagaaggagacaggcaagcagctggtcatccaggagagcatcctgatgctgcccgaagaagtcgaagaagtgatcggaaacaagcctgagagcgatatcctggtccataccgcctacgacgagagtaccgacgaaaatgtgatgctgctgacatccgacgccccagagtataagccctgggctctggtcatccaggattccaacggagagaacaaaatcaaaatgctgtctggcggctcaaaaagaaccgccgacggcagcgaattcgagcccaagaagaagaggaaagtctaaccggtcatcatcaccatcaccattgagtttaaacccgctgatcagcctcgactgtgccttctagttgccagccatctgttgtttgcccctcccccgtgccttccttgaccctggaaggtgccactcccactgtcctttcctaataaaatgaggaaattgcatcgcattgtctgagtaggtgtcattctattctggggggtggggtggggcaggacagcaagggggaggattgggaagacaatagcaggcatgctggggatgcggtgggctctatggcttctgaggcggaaagaaccagctggggctcgataccgtcgacctctagctagagcttggcgtaatcatggtcatagctgtttcctgtgtgaaattgttatccgctcacaattccacacaacatacgagccggaagcataaagtgtaaagcctagggtgcctaatgagtgagctaactcacattaattgcgttgcgctcactgcccgctttccagtcgggaaacctgtcgtgccagctgcattaatgaatcggccaacgcgcggggagaggcggtttgcgtattgggcgcacttccgcttcctcgctcactgactcgctgcgctcggtcgttcggctgcggcgagcggtatcagctcactcaaaggcggtaatacggttatccacagaatcaggggataacgcaggaaagaacatgtgagcaaaaggccagcaaaaggccaggaaccgtaaaaaggccgcgttgctggcgtttttccataggctccgcccccctgacgagcatcacaaaaatcgacgctcaagtcagaggtggcgaaacccgacaggactataaagataccaggcgtttccccctggaagctccctcgtgcgctctcctgttccgaccctgccgcttaccggatacctgtccgcctttctcccttcgggaagcgtggcgctttctcatagctcacgctgtaggtatctcagttcggtgtaggtcgttcgctccaagctgggctgtgtgcacgaaccccccgttcagcccgaccgctgcgccttatccggtaactatcgtcttgagtccaacccggtaagacacgacttatcgccactggcagcagccactggtaacaggattagcagagcgaggtatgtaggcggtgctacagagttcttgaagtggtggcctaactacggctacactagaagaacagtatttggtatctgcgctctgctgaagccagttaccttcggaaaaagagttggtagctcttgatccggcaaacaaaccaccgctggtagcggtggtttttttgtttgcaagcagcagattacgcgcagaaaaaaaggatctcaagaagatcctttgatcttttctacggggtctgacactcagtggaacgaaaactcacgttaagggattttggtcatgagattatcaaaaaggatcttcacctagatccttttaaattaaaaatgaagttttaaatcaatctaaagtatatatgagtaaacttggtctgacagttaccaatgcttaatcagtgaggcacctatctcagcgatctgtctatttcgttcatccatagttgcctgactccccgtcgtgtagataactacgatacgggagggcttaccatctggccccagtgctgcaatgataccgcgggacccacgctcaccggctccagatttatcagcaataaaccagccagccggaagggccgagcgcagaagtggtcctgcaactttatccgcctccatccagtctattaattgttgccgggaagctagagtaagtagttcgccagttaatagtttgcgcaacgttgttgccattgctacaggcatcgtggtgtcacgctcgtcgtttggtatggcttcattcagctccggttcccaacgatcaaggcgagttacatgatcccccatgttgtgcaaaaaagcggttagctccttcggtcctccgatcgttgtcagaagtaagttggccgcagtgttatcactcatggttatggcagcactgcataattctcttactgtcatgccatccgtaagatgcttttctgtgactggtgagtactcaaccaagtcattctgagaatagtgtatgcggcgaccgagttgctcttgcccggcgtcaatacgggataataccgcgccacatagcagaactttaaaagtgctcatcattggaaaacgttcttcggggcgaaaactctcaaggatcttaccgctgttgagatccagttcgatgtaacccactcgtgcacccaactgatcttcagcatcttttactttcaccagcgtttctgggtgagcaaaaacaggaaggcaaaatgccgcaaaaaagggaataagggcgacacggaaatgttgaatactcatactcttcctttttcaatattattgaagcatttatcagggttattgtctcatgagcggatacatatttgaatgtatttagaaaaataaacaaataggggttccgcgcacatttccccgaaaagtgccacctgacgtcgacggatcgggagatcgatctcccgatcccctagggtcgactctcagtacaatctgctctgatgccgcatagttaagccagtatctgctccctgcttgtgtgttggaggtcgctgagtagtgcgcgagcaaaatttaagctacaacaaggcaaggcttgaccgacaattgcatgaagaatctgcttagggttaggcgttttgcgctgcttcgcgatgtacgggccagatatacgcgttgacattgattattgac

SEQ ID NO: 3658 - protein, 1853 aa, synthetic construct
MKRTADGSEFESPKKKRKVSSETGPVAVDPTLRRRIEPHEFEVFFDPRELRKETCLLYEINWGGRHSIWRHTSQNTNKHVEVNFIEKFTTERYFCPNTRCSITWFLSWSPCGECSRAITEFLSRYPHVTLFIYIARLYHHADPRNRQGLRDLISSGVTIQIMTEQESGYCWRNFVNYSPSNEAHWPRYPHLWVRLYVLELYCIILGLPPCLNILRRKQPQLTFFTIALQSCHYQRLPPHILWATGLKSGGSSGGSSGSETPGTSESATPESSGGSSGGSDKKYSIGLAIGTNSVGWAVITDEYKVPSKKFKVLGNTDRHSIKKNLIGALLFDSGETAEATRLKRTARRRYTRRKNRICYLQEIFSNEMAKVDDSFFHRLEESFLVEEDKKHERHPIFGNIVDEVAYHEKYPTIYHLRKKLVDSTDKADLRLIYLALAHMIKFRGHFLIEGDLNPDNSDVDKLFIQLVQTYNQLFEENPINASGVDAKAILSARLSKSRRLENLIAQLPGEKKNGLFGNLIALSLGLTPNFKSNFDLAEDAKLQLSKDTYDDDLDNLLAQIGDQYADLFLAAKNLSDAILLSDILRVNTEITKAPLSASMIKRYDEHHQDLTLLKALVRQQLPEKYKEIFFDQSKNGYAGYIDGGASQEEFYKFIKPILEKMDGTEELLVKLNREDLLRKQRTFDNGSIPHQIHLGELHAILRRQEDFYPFLKDNREKIEKILTFRIPYYVGPLARGNSRFAWMTRKSEETITPWNFEEVVDKGASAQSFIERMTNFDKNLPNEKVLPKHSLLYEYFTVYNELTKVKYVTEGMRKPAFLSGEQKKAIVDLLFKTNRKVTVKQLKEDYFKKIECFDSVEISGVEDRFNASLGTYHDLLKIIKDKDFLDNEENEDILEDIVLTLTLFEDREMIEERLKTYAHLFDDKVMKQLKRRRYTGWGRLSRKLINGIRDKQSGKTILDFLKSDGFANRNFMQLIHDDSLTFKEDIQKAQVSGQGDSLHEHIANLAGSPAIKKGILQTVKVVDELVKVMGRHKPENIVIEMARENQTTQKGQKNSRERMKRIEEGIKELGSQILKEHPVENTQLQNEKLYLYYLQNGRDMYVDQELDINRLSDYDVDHIVPQSFLKDDSIDNKVLTRSDKNRGKSDNVPSEEVVKKMKNYWRQLLNAKLITQRKFDNLTKAERGGLSELDKAGFIKRQLVETRQITKHVAQILDSRMNTKYDENDKLIREVKVITLKSKLVSDFRKDFQFYKVREINNYHHAHDAYLNAVVGTALIKKYPKLESEFVYGDYKVYDVRKMIAKSEQEIGKATAKYFFYSNIMNFFKTEITLANGEIRKRPLIETNGETGEIVWDKGRDFATVRKVLSMPQVNIVKKTEVQTGGFSKESILPKRNSDKLIARKKDWDPKKYGGFDSPTVAYSVLVVAKVEKGKSKKLKSVKELLGITIMERSSFEKNPIDFLEAKGYKEVKKDLIIKLPKYSLFELENGRKRMLASAGELQKGNELALPSKYVNFLYLASHYEKLKGSPEDNEQKQLFVEQHKHYLDEIIEQISEFSKRVILADANLDKVLSAYNKHRDKPIREQAENIIHLFTLTNLGAPAAFKYFDTTIDRKRYTSTKEVLDATLIHQSITGLYETRIDLSQLGGDSGGSGGSGGSTNLSDIIEKETGKQLVIQESILMLPEEVEEVIGNKPESDILVHTAYDESTDENVMLLTSDAPEYKPWALVIQDSNGENKIKMLSGGSGGSGGSTNLSDIIEKETGKQLVIQESILMLPEEVEEVIGNKPESDILVHTAYDESTDENVMLLTSDAPEYKPWALVIQDSNGENKIKMLSGGSKRTADGSEFEPKKKRKV

SEQ ID NO: 3659 - protein, 1853 aa, synthetic construct
MKRTADGSEFESPKKKRKVSSETGPVAVDPTLRRRIEPHEFEVFFDPRELRKETCLLYEINWGGRHSIWRHTSQNTNKHVEVNFIEKFTTERYFCPNTRCSITWFLSYSPCGECSRAITEFLSRYPHVTLFIYIARLYHHADPENRQGLRDLISSGVTIQIMTEQESGYCWRNFVNYSPSNEAHWPRYPHLWVRLYVLELYCIILGLPPCLNILRRKQPQLTFFTIALQSCHYQRLPPHILWATGLKSGGSSGGSSGSETPGTSESATPESSGGSSGGSDKKYSIGLAIGTNSVGWAVITDEYKVPSKKFKVLGNTDRHSIKKNLIGALLFDSGETAEATRLKRTARRRYTRRKNRICYLQEIFSNEMAKVDDSFFHRLEESFLVEEDKKHERHPIFGNIVDEVAYHEKYPTIYHLRKKLVDSTDKADLRLIYLALAHMIKFRGHFLIEGDLNPDNSDVDKLFIQLVQTYNQLFEENPINASGVDAKAILSARLSKSRRLENLIAQLPGEKKNGLFGNLIALSLGLTPNFKSNFDLAEDAKLQLSKDTYDDDLDNLLAQIGDQYADLFLAAKNLSDAILLSDILRVNTEITKAPLSASMIKRYDEHHQDLTLLKALVRQQLPEKYKEIFFDQSKNGYAGYIDGGASQEEFYKFIKPILEKMDGTEELLVKLNREDLLRKQRTFDNGSIPHQIHLGELHAILRRQEDFYPFLKDNREKIEKILTFRIPYYVGPLARGNSRFAWMTRKSEETITPWNFEEVVDKGASAQSFIERMTNFDKNLPNEKVLPKHSLLYEYFTVYNELTKVKYVTEGMRKPAFLSGEQKKAIVDLLFKTNRKVTVKQLKEDYFKKIECFDSVEISGVEDRFNASLGTYHDLLKIIKDKDFLDNEENEDILEDIVLTLTLFEDREMIEERLKTYAHLFDDKVMKQLKRRRYTGWGRLSRKLINGIRDKQSGKTILDFLKSDGFANRNFMQLIHDDSLTFKEDIQKAQVSGQGDSLHEHIANLAGSPAIKKGILQTVKVVDELVKVMGRHKPENIVIEMARENQTTQKGQKNSRERMKRIEEGIKELGSQILKEHPVENTQLQNEKLYLYYLQNGRDMYVDQELDINRLSDYDVDHIVPQSFLKDDSIDNKVLTRSDKNRGKSDNVPSEEVVKKMKNYWRQLLNAKLITQRKFDNLTKAERGGLSELDKAGFIKRQLVETRQITKHVAQILDSRMNTKYDENDKLIREVKVITLKSKLVSDFRKDFQFYKVREINNYHHAHDAYLNAVVGTALIKKYPKLESEFVYGDYKVYDVRKMIAKSEQEIGKATAKYFFYSNIMNFFKTEITLANGEIRKRPLIETNGETGEIVWDKGRDFATVRKVLSMPQVNIVKKTEVQTGGFSKESILPKRNSDKLIARKKDWDPKKYGGFDSPTVAYSVLVVAKVEKGKSKKLKSVKELLGITIMERSSFEKNPIDFLEAKGYKEVKKDLIIKLPKYSLFELENGRKRMLASAGELQKGNELALPSKYVNFLYLASHYEKLKGSPEDNEQKQLFVEQHKHYLDEIIEQISEFSKRVILADANLDKVLSAYNKHRDKPIREQAENIIHLFTLTNLGAPAAFKYFDTTIDRKRYTSTKEVLDATLIHQSITGLYETRIDLSQLGGDSGGSGGSGGSTNLSDIIEKETGKQLVIQESILMLPEEVEEVIGNKPESDILVHTAYDESTDENVMLLTSDAPEYKPWALVIQDSNGENKIKMLSGGSGGSGGSTNLSDIIEKETGKQLVIQESILMLPEEVEEVIGNKPESDILVHTAYDESTDENVMLLTSDAPEYKPWALVIQDSNGENKIKMLSGGSKRTADGSEFEPKKKRKV

SEQ ID NO: 3660 - protein, 1853 aa, synthetic construct
MKRTADGSEFESPKKKRKVSSETGPVAVDPTLRRRIEPHEFEVFFDPRELRKETCLLYEINWGGRHSIWRHTSQNTNKHVEVNFIEKFTTERYFCPNTRCSITWFLSYSPCGECSRAITEFLSRYPHVTLFIYIARLYHHADPRNRQGLEDLISSGVTIQIMTEQESGYCWRNFVNYSPSNEAHWPRYPHLWVRLYVLELYCIILGLPPCLNILRRKQPQLTFFTIALQSCHYQRLPPHILWATGLKSGGSSGGSSGSETPGTSESATPESSGGSSGGSDKKYSIGLAIGTNSVGWAVITDEYKVPSKKFKVLGNTDRHSIKKNLIGALLFDSGETAEATRLKRTARRRYTRRKNRICYLQEIFSNEMAKVDDSFFHRLEESFLVEEDKKHERHPIFGNIVDEVAYHEKYPTIYHLRKKLVDSTDKADLRLIYLALAHMIKFRGHFLIEGDLNPDNSDVDKLFIQLVQTYNQLFEENPINASGVDAKAILSARLSKSRRLENLIAQLPGEKKNGLFGNLIALSLGLTPNFKSNFDLAEDAKLQLSKDTYDDDLDNLLAQIGDQYADLFLAAKNLSDAILLSDILRVNTEITKAPLSASMIKRYDEHHQDLTLLKALVRQQLPEKYKEIFFDQSKNGYAGYIDGGASQEEFYKFIKPILEKMDGTEELLVKLNREDLLRKQRTFDNGSIPHQIHLGELHAILRRQEDFYPFLKDNREKIEKILTFRIPYYVGPLARGNSRFAWMTRKSEETITPWNFEEVVDKGASAQSFIERMTNFDKNLPNEKVLPKHSLLYEYFTVYNELTKVKYVTEGMRKPAFLSGEQKKAIVDLLFKTNRKVTVKQLKEDYFKKIECFDSVEISGVEDRFNASLGTYHDLLKIIKDKDFLDNEENEDILEDIVLTLTLFEDREMIEERLKTYAHLFDDKVMKQLKRRRYTGWGRLSRKLINGIRDKQSGKTILDFLKSDGFANRNFMQLIHDDSLTFKEDIQKAQVSGQGDSLHEHIANLAGSPAIKKGILQTVKVVDELVKVMGRHKPENIVIEMARENQTTQKGQKNSRERMKRIEEGIKELGSQILKEHPVENTQLQNEKLYLYYLQNGRDMYVDQELDINRLSDYDVDHIVPQSFLKDDSIDNKVLTRSDKNRGKSDNVPSEEVVKKMKNYWRQLLNAKLITQRKFDNLTKAERGGLSELDKAGFIKRQLVETRQITKHVAQILDSRMNTKYDENDKLIREVKVITLKSKLVSDFRKDFQFYKVREINNYHHAHDAYLNAVVGTALIKKYPKLESEFVYGDYKVYDVRKMIAKSEQEIGKATAKYFFYSNIMNFFKTEITLANGEIRKRPLIETNGETGEIVWDKGRDFATVRKVLSMPQVNIVKKTEVQTGGFSKESILPKRNSDKLIARKKDWDPKKYGGFDSPTVAYSVLVVAKVEKGKSKKLKSVKELLGITIMERSSFEKNPIDFLEAKGYKEVKKDLIIKLPKYSLFELENGRKRMLASAGELQKGNELALPSKYVNFLYLASHYEKLKGSPEDNEQKQLFVEQHKHYLDEIIEQISEFSKRVILADANLDKVLSAYNKHRDKPIREQAENIIHLFTLTNLGAPAAFKYFDTTIDRKRYTSTKEVLDATLIHQSITGLYETRIDLSQLGGDSGGSGGSGGSTNLSDIIEKETGKQLVIQESILMLPEEVEEVIGNKPESDILVHTAYDESTDENVMLLTSDAPEYKPWALVIQDSNGENKIKMLSGGSGGSGGSTNLSDIIEKETGKQLVIQESILMLPEEVEEVIGNKPESDILVHTAYDESTDENVMLLTSDAPEYKPWALVIQDSNGENKIKMLSGGSKRTADGSEFEPKKKRKV

SEQ ID NO: 3661 - protein, 1853 aa, synthetic construct
MKRTADGSEFESPKKKRKVSSETGPVAVDPTLRRRIEPHEFEVFFDPRELRKETCLLYEINWGGRHSIWRHTSQNTNKHVEVNFIEKFTTERYFCPNTRCSITWFLSYSPCGECSRAITEFLSRYPHVTLFIYIARLYHHADPENRQGLEDLISSGVTIQIMTEQESGYCWRNFVNYSPSNEAHWPRYPHLWVRLYVLELYCIILGLPPCLNILRRKQPQLTFFTIALQSCHYQRLPPHILWATGLKSGGSSGGSSGSETPGTSESATPESSGGSSGGSDKKYSIGLAIGTNSVGWAVITDEYKVPSKKFKVLGNTDRHSIKKNLIGALLFDSGETAEATRLKRTARRRYTRRKNRICYLQEIFSNEMAKVDDSFFHRLEESFLVEEDKKHERHPIFGNIVDEVAYHEKYPTIYHLRKKLVDSTDKADLRLIYLALAHMIKFRGHFLIEGDLNPDNSDVDKLFIQLVQTYNQLFEENPINASGVDAKAILSARLSKSRRLENLIAQLPGEKKNGLFGNLIALSLGLTPNFKSNFDLAEDAKLQLSKDTYDDDLDNLLAQIGDQYADLFLAAKNLSDAILLSDILRVNTEITKAPLSASMIKRYDEHHQDLTLLKALVRQQLPEKYKEIFFDQSKNGYAGYIDGGASQEEFYKFIKPILEKMDGTEELLVKLNREDLLRKQRTFDNGSIPHQIHLGELHAILRRQEDFYPFLKDNREKIEKILTFRIPYYVGPLARGNSRFAWMTRKSEETITPWNFEEVVDKGASAQSFIERMTNFDKNLPNEKVLPKHSLLYEYFTVYNELTKVKYVTEGMRKPAFLSGEQKKAIVDLLFKTNRKVTVKQLKEDYFKKIECFDSVEISGVEDRFNASLGTYHDLLKIIKDKDFLDNEENEDILEDIVLTLTLFEDREMIEERLKTYAHLFDDKVMKQLKRRRYTGWGRLSRKLINGIRDKQSGKTILDFLKSDGFANRNFMQLIHDDSLTFKEDIQKAQVSGQGDSLHEHIANLAGSPAIKKGILQTVKVVDELVKVMGRHKPENIVIEMARENQTTQKGQKNSRERMKRIEEGIKELGSQILKEHPVENTQLQNEKLYLYYLQNGRDMYVDQELDINRLSDYDVDHIVPQSFLKDDSIDNKVLTRSDKNRGKSDNVPSEEVVKKMKNYWRQLLNAKLITQRKFDNLTKAERGGLSELDKAGFIKRQLVETRQITKHVAQILDSRMNTKYDENDKLIREVKVITLKSKLVSDFRKDFQFYKVREINNYHHAHDAYLNAVVGTALIKKYPKLESEFVYGDYKVYDVRKMIAKSEQEIGKATAKYFFYSNIMNFFKTEITLANGEIRKRPLIETNGETGEIVWDKGRDFATVRKVLSMPQVNIVKKTEVQTGGFSKESILPKRNSDKLIARKKDWDPKKYGGFDSPTVAYSVLVVAKVEKGKSKKLKSVKELLGITIMERSSFEKNPIDFLEAKGYKEVKKDLIIKLPKYSLFELENGRKRMLASAGELQKGNELALPSKYVNFLYLASHYEKLKGSPEDNEQKQLFVEQHKHYLDEIIEQISEFSKRVILADANLDKVLSAYNKHRDKPIREQAENIIHLFTLTNLGAPAAFKYFDTTIDRKRYTSTKEVLDATLIHQSITGLYETRIDLSQLGGDSGGSGGSGGSTNLSDIIEKETGKQLVIQESILMLPEEVEEVIGNKPESDILVHTAYDESTDENVMLLTSDAPEYKPWALVIQDSNGENKIKMLSGGSGGSGGSTNLSDIIEKETGKQLVIQESILMLPEEVEEVIGNKPESDILVHTAYDESTDENVMLLTSDAPEYKPWALVIQDSNGENKIKMLSGGSKRTADGSEFEPKKKRKV

SEQ ID NO: 3662 - protein, 1853 aa, synthetic construct
MKRTADGSEFESPKKKRKVSSETGPVAVDPTLRRRIEPHEFEVFFDPRELRKETCLLYEINWGGRHSIWRHTSQNTNKHVEVNFIEKFTTERYFCPNTRCSITWFLSWSPCGECSRAITEFLSRYPHVTLFIYIARLYHHADPENRQGLEDLISSGVTIQIMTEQESGYCWRNFVNYSPSNEAHWPRYPHLWVRLYVLELYCIILGLPPCLNILRRKQPQLTFFTIALQSCHYQRLPPHILWATGLKSGGSSGGSSGSETPGTSESATPESSGGSSGGSDKKYSIGLAIGTNSVGWAVITDEYKVPSKKFKVLGNTDRHSIKKNLIGALLFDSGETAEATRLKRTARRRYTRRKNRICYLQEIFSNEMAKVDDSFFHRLEESFLVEEDKKHERHPIFGNIVDEVAYHEKYPTIYHLRKKLVDSTDKADLRLIYLALAHMIKFRGHFLIEGDLNPDNSDVDKLFIQLVQTYNQLFEENPINASGVDAKAILSARLSKSRRLENLIAQLPGEKKNGLFGNLIALSLGLTPNFKSNFDLAEDAKLQLSKDTYDDDLDNLLAQIGDQYADLFLAAKNLSDAILLSDILRVNTEITKAPLSASMIKRYDEHHQDLTLLKALVRQQLPEKYKEIFFDQSKNGYAGYIDGGASQEEFYKFIKPILEKMDGTEELLVKLNREDLLRKQRTFDNGSIPHQIHLGELHAILRRQEDFYPFLKDNREKIEKILTFRIPYYVGPLARGNSRFAWMTRKSEETITPWNFEEVVDKGASAQSFIERMTNFDKNLPNEKVLPKHSLLYEYFTVYNELTKVKYVTEGMRKPAFLSGEQKKAIVDLLFKTNRKVTVKQLKEDYFKKIECFDSVEISGVEDRFNASLGTYHDLLKIIKDKDFLDNEENEDILEDIVLTLTLFEDREMIEERLKTYAHLFDDKVMKQLKRRRYTGWGRLSRKLINGIRDKQSGKTILDFLKSDGFANRNFMQLIHDDSLTFKEDIQKAQVSGQGDSLHEHIANLAGSPAIKKGILQTVKVVDELVKVMGRHKPENIVIEMARENQTTQKGQKNSRERMKRIEEGIKELGSQILKEHPVENTQLQNEKLYLYYLQNGRDMYVDQELDINRLSDYDVDHIVPQSFLKDDSIDNKVLTRSDKNRGKSDNVPSEEVVKKMKNYWRQLLNAKLITQRKFDNLTKAERGGLSELDKAGFIKRQLVETRQITKHVAQILDSRMNTKYDENDKLIREVKVITLKSKLVSDFRKDFQFYKVREINNYHHAHDAYLNAVVGTALIKKYPKLESEFVYGDYKVYDVRKMIAKSEQEIGKATAKYFFYSNIMNFFKTEITLANGEIRKRPLIETNGETGEIVWDKGRDFATVRKVLSMPQVNIVKKTEVQTGGFSKESILPKRNSDKLIARKKDWDPKKYGGFDSPTVAYSVLVVAKVEKGKSKKLKSVKELLGITIMERSSFEKNPIDFLEAKGYKEVKKDLIIKLPKYSLFELENGRKRMLASAGELQKGNELALPSKYVNFLYLASHYEKLKGSPEDNEQKQLFVEQHKHYLDEIIEQISEFSKRVILADANLDKVLSAYNKHRDKPIREQAENIIHLFTLTNLGAPAAFKYFDTTIDRKRYTSTKEVLDATLIHQSITGLYETRIDLSQLGGDSGGSGGSGGSTNLSDIIEKETGKQLVIQESILMLPEEVEEVIGNKPESDILVHTAYDESTDENVMLLTSDAPEYKPWALVIQDSNGENKIKMLSGGSGGSGGSTNLSDIIEKETGKQLVIQESILMLPEEVEEVIGNKPESDILVHTAYDESTDENVMLLTSDAPEYKPWALVIQDSNGENKIKMLSGGSKRTADGSEFEPKKKRKV

SEQ ID NO: 3663 - protein, 1853 aa, synthetic construct
MKRTADGSEFESPKKKRKVSSETGPVAVDPTLRRRIEPHEFEVFFDPRELAKETCLLYEINWGGRHSIWRHTSQNTNKHVEVNFIEKFTTERYFCPNTRCSITWFLSWSPCGECSRAITEFLSRYPHVTLFIYIARLYHHADPRNRQGLRDLISSGVTIQIMTEQESGYCWRNFVNYSPSNEAHWPRYPHLWVRLYVLELYCIILGLPPCLNILRRKQPQLTFFTIALQSCHYQRLPPHILWATGLKSGGSSGGSSGSETPGTSESATPESSGGSSGGSDKKYSIGLAIGTNSVGWAVITDEYKVPSKKFKVLGNTDRHSIKKNLIGALLFDSGETAEATRLKRTARRRYTRRKNRICYLQEIFSNEMAKVDDSFFHRLEESFLVEEDKKHERHPIFGNIVDEVAYHEKYPTIYHLRKKLVDSTDKADLRLIYLALAHMIKFRGHFLIEGDLNPDNSDVDKLFIQLVQTYNQLFEENPINASGVDAKAILSARLSKSRRLENLIAQLPGEKKNGLFGNLIALSLGLTPNFKSNFDLAEDAKLQLSKDTYDDDLDNLLAQIGDQYADLFLAAKNLSDAILLSDILRVNTEITKAPLSASMIKRYDEHHQDLTLLKALVRQQLPEKYKEIFFDQSKNGYAGYIDGGASQEEFYKFIKPILEKMDGTEELLVKLNREDLLRKQRTFDNGSIPHQIHLGELHAILRRQEDFYPFLKDNREKIEKILTFRIPYYVGPLARGNSRFAWMTRKSEETITPWNFEEVVDKGASAQSFIERMTNFDKNLPNEKVLPKHSLLYEYFTVYNELTKVKYVTEGMRKPAFLSGEQKKAIVDLLFKTNRKVTVKQLKEDYFKKIECFDSVEISGVEDRFNASLGTYHDLLKIIKDKDFLDNEENEDILEDIVLTLTLFEDREMIEERLKTYAHLFDDKVMKQLKRRRYTGWGRLSRKLINGIRDKQSGKTILDFLKSDGFANRNFMQLIHDDSLTFKEDIQKAQVSGQGDSLHEHIANLAGSPAIKKGILQTVKVVDELVKVMGRHKPENIVIEMARENQTTQKGQKNSRERMKRIEEGIKELGSQILKEHPVENTQLQNEKLYLYYLQNGRDMYVDQELDINRLSDYDVDHIVPQSFLKDDSIDNKVLTRSDKNRGKSDNVPSEEVVKKMKNYWRQLLNAKLITQRKFDNLTKAERGGLSELDKAGFIKRQLVETRQITKHVAQILDSRMNTKYDENDKLIREVKVITLKSKLVSDFRKDFQFYKVREINNYHHAHDAYLNAVVGTALIKKYPKLESEFVYGDYKVYDVRKMIAKSEQEIGKATAKYFFYSNIMNFFKTEITLANGEIRKRPLIETNGETGEIVWDKGRDFATVRKVLSMPQVNIVKKTEVQTGGFSKESILPKRNSDKLIARKKDWDPKKYGGFDSPTVAYSVLVVAKVEKGKSKKLKSVKELLGITIMERSSFEKNPIDFLEAKGYKEVKKDLIIKLPKYSLFELENGRKRMLASAGELQKGNELALPSKYVNFLYLASHYEKLKGSPEDNEQKQLFVEQHKHYLDEIIEQISEFSKRVILADANLDKVLSAYNKHRDKPIREQAENIIHLFTLTNLGAPAAFKYFDTTIDRKRYTSTKEVLDATLIHQSITGLYETRIDLSQLGGDSGGSGGSGGSTNLSDIIEKETGKQLVIQESILMLPEEVEEVIGNKPESDILVHTAYDESTDENVMLLTSDAPEYKPWALVIQDSNGENKIKMLSGGSGGSGGSTNLSDIIEKETGKQLVIQESILMLPEEVEEVIGNKPESDILVHTAYDESTDENVMLLTSDAPEYKPWALVIQDSNGENKIKMLSGGSKRTADGSEFEPKKKRKV

SEQ ID NO: 3664 - protein, 1853 aa, synthetic construct
MKRTADGSEFESPKKKRKVSSETGPVAVDPTLRRRIEPHEFEVFFDPRELAAETCLLYEINWGGRHSIWRHTSQNTNKHVEVNFIEKFTTERYFCPNTRCSITWFLSWSPCGECSRAITEFLSRYPHVTLFIYIARLYHHADPRNRQGLRDLISSGVTIQIMTEQESGYCWRNFVNYSPSNEAHWPRYPHLWVRLYVLELYCIILGLPPCLNILRRKQPQLTFFTIALQSCHYQRLPPHILWATGLKSGGSSGGSSGSETPGTSESATPESSGGSSGGSDKKYSIGLAIGTNSVGWAVITDEYKVPSKKFKVLGNTDRHSIKKNLIGALLFDSGETAEATRLKRTARRRYTRRKNRICYLQEIFSNEMAKVDDSFFHRLEESFLVEEDKKHERHPIFGNIVDEVAYHEKYPTIYHLRKKLVDSTDKADLRLIYLALAHMIKFRGHFLIEGDLNPDNSDVDKLFIQLVQTYNQLFEENPINASGVDAKAILSARLSKSRRLENLIAQLPGEKKNGLFGNLIALSLGLTPNFKSNFDLAEDAKLQLSKDTYDDDLDNLLAQIGDQYADLFLAAKNLSDAILLSDILRVNTEITKAPLSASMIKRYDEHHQDLTLLKALVRQQLPEKYKEIFFDQSKNGYAGYIDGGASQEEFYKFIKPILEKMDGTEELLVKLNREDLLRKQRTFDNGSIPHQIHLGELHAILRRQEDFYPFLKDNREKIEKILTFRIPYYVGPLARGNSRFAWMTRKSEETITPWNFEEVVDKGASAQSFIERMTNFDKNLPNEKVLPKHSLLYEYFTVYNELTKVKYVTEGMRKPAFLSGEQKKAIVDLLFKTNRKVTVKQLKEDYFKKIECFDSVEISGVEDRFNASLGTYHDLLKIIKDKDFLDNEENEDILEDIVLTLTLFEDREMIEERLKTYAHLFDDKVMKQLKRRRYTGWGRLSRKLINGIRDKQSGKTILDFLKSDGFANRNFMQLIHDDSLTFKEDIQKAQVSGQGDSLHEHIANLAGSPAIKKGILQTVKVVDELVKVMGRHKPENIVIEMARENQTTQKGQKNSRERMKRIEEGIKELGSQILKEHPVENTQLQNEKLYLYYLQNGRDMYVDQELDINRLSDYDVDHIVPQSFLKDDSIDNKVLTRSDKNRGKSDNVPSEEVVKKMKNYWRQLLNAKLITQRKFDNLTKAERGGLSELDKAGFIKRQLVETRQITKHVAQILDSRMNTKYDENDKLIREVKVITLKSKLVSDFRKDFQFYKVREINNYHHAHDAYLNAVVGTALIKKYPKLESEFVYGDYKVYDVRKMIAKSEQEIGKATAKYFFYSNIMNFFKTEITLANGEIRKRPLIETNGETGEIVWDKGRDFATVRKVLSMPQVNIVKKTEVQTGGFSKESILPKRNSDKLIARKKDWDPKKYGGFDSPTVAYSVLVVAKVEKGKSKKLKSVKELLGITIMERSSFEKNPIDFLEAKGYKEVKKDLIIKLPKYSLFELENGRKRMLASAGELQKGNELALPSKYVNFLYLASHYEKLKGSPEDNEQKQLFVEQHKHYLDEIIEQISEFSKRVILADANLDKVLSAYNKHRDKPIREQAENIIHLFTLTNLGAPAAFKYFDTTIDRKRYTSTKEVLDATLIHQSITGLYETRIDLSQLGGDSGGSGGSGGSTNLSDIIEKETGKQLVIQESILMLPEEVEEVIGNKPESDILVHTAYDESTDENVMLLTSDAPEYKPWALVIQDSNGENKIKMLSGGSGGSGGSTNLSDIIEKETGKQLVIQESILMLPEEVEEVIGNKPESDILVHTAYDESTDENVMLLTSDAPEYKPWALVIQDSNGENKIKMLSGGSKRTADGSEFEPKKKRKV

SEQ ID NO: 3665 - protein, 1824 aa, synthetic construct
MKRTADGSEFESPKKKRKVSEASPASGPRHLMDPHIFTSNFNNGIGRHKTYLCYEVERLDNGTSVKMDQHRGFLHNQAKNLLCGFYGRHAELRFLDLVPSLQLDPAQIYRVTWFISWSPCFSWGCAGEVRAFLQENTHVRLRIFAARIYDYDPLYKEALQMLRDAGAQVSIMTYDEFKHCWDTFVDHQGCPFQPWDGLDEHSQALSGRLRAILQNQGNSGGSSGGSSGSETPGTSESATPESSGGSSGGSDKKYSIGLAIGTNSVGWAVITDEYKVPSKKFKVLGNTDRHSIKKNLIGALLFDSGETAEATRLKRTARRRYTRRKNRICYLQEIFSNEMAKVDDSFFHRLEESFLVEEDKKHERHPIFGNIVDEVAYHEKYPTIYHLRKKLVDSTDKADLRLIYLALAHMIKFRGHFLIEGDLNPDNSDVDKLFIQLVQTYNQLFEENPINASGVDAKAILSARLSKSRRLENLIAQLPGEKKNGLFGNLIALSLGLTPNFKSNFDLAEDAKLQLSKDTYDDDLDNLLAQIGDQYADLFLAAKNLSDAILLSDILRVNTEITKAPLSASMIKRYDEHHQDLTLLKALVRQQLPEKYKEIFFDQSKNGYAGYIDGGASQEEFYKFIKPILEKMDGTEELLVKLNREDLLRKQRTFDNGSIPHQIHLGELHAILRRQEDFYPFLKDNREKIEKILTFRIPYYVGPLARGNSRFAWMTRKSEETITPWNFEEVVDKGASAQSFIERMTNFDKNLPNEKVLPKHSLLYEYFTVYNELTKVKYVTEGMRKPAFLSGEQKKAIVDLLFKTNRKVTVKQLKEDYFKKIECFDSVEISGVEDRFNASLGTYHDLLKIIKDKDFLDNEENEDILEDIVLTLTLFEDREMIEERLKTYAHLFDDKVMKQLKRRRYTGWGRLSRKLINGIRDKQSGKTILDFLKSDGFANRNFMQLIHDDSLTFKEDIQKAQVSGQGDSLHEHIANLAGSPAIKKGILQTVKVVDELVKVMGRHKPENIVIEMARENQTTQKGQKNSRERMKRIEEGIKELGSQILKEHPVENTQLQNEKLYLYYLQNGRDMYVDQELDINRLSDYDVDHIVPQSFLKDDSIDNKVLTRSDKNRGKSDNVPSEEVVKKMKNYWRQLLNAKLITQRKFDNLTKAERGGLSELDKAGFIKRQLVETRQITKHVAQILDSRMNTKYDENDKLIREVKVITLKSKLVSDFRKDFQFYKVREINNYHHAHDAYLNAVVGTALIKKYPKLESEFVYGDYKVYDVRKMIAKSEQEIGKATAKYFFYSNIMNFFKTEITLANGEIRKRPLIETNGETGEIVWDKGRDFATVRKVLSMPQVNIVKKTEVQTGGFSKESILPKRNSDKLIARKKDWDPKKYGGFDSPTVAYSVLVVAKVEKGKSKKLKSVKELLGITIMERSSFEKNPIDFLEAKGYKEVKKDLIIKLPKYSLFELENGRKRMLASAGELQKGNELALPSKYVNFLYLASHYEKLKGSPEDNEQKQLFVEQHKHYLDEIIEQISEFSKRVILADANLDKVLSAYNKHRDKPIREQAENIIHLFTLTNLGAPAAFKYFDTTIDRKRYTSTKEVLDATLIHQSITGLYETRIDLSQLGGDSGGSGGSGGSTNLSDIIEKETGKQLVIQESILMLPEEVEEVIGNKPESDILVHTAYDESTDENVMLLTSDAPEYKPWALVIQDSNGENKIKMLSGGSGGSGGSTNLSDIIEKETGKQLVIQESILMLPEEVEEVIGNKPESDILVHTAYDESTDENVMLLTSDAPEYKPWALVIQDSNGENKIKMLSGGSKRTADGSEFEPKKKRKV

SEQ ID NO: 3666 - protein, 2006 aa, synthetic construct
MKRTADGSEFESPKKKRKVNPQIRNPMERMYRDTFYDNFENEPILYGRSYTWLCYEVKIKRGRSNLLWDTGVFRGQVYFKPQYHAEMCFLSWFCGNQLPAYKCFQITWFVSWTPCPDCVAKLAEFLSEHPNVTLTISAARLYYYWERDYRRALCRLSQAGARVTIMDYEEFAYCWENFVYNEGQQFMPWYKFDENYAFLHRTLKEILRYLMDPDTFTFNFNNDPLVLRRRQTYLCYEVERLDNGTWVLMDQHMGFLCNEAKNLLCGFYGRHAELRFLDLVPSLQLDPAQIYRVTWFISWSPCFSWGCAGEVRAFLQENTHVRLRIFAARIYDYDPLYKEALQMLRDAGAQVSIMTYDEFEYCWDTFVYRQGCPFQPWDGLEEHSQALSGRLRAILQNQGNSGGSSGGSSGSETPGTSESATPESSGGSSGGSDKKYSIGLAIGTNSVGWAVITDEYKVPSKKFKVLGNTDRHSIKKNLIGALLFDSGETAEATRLKRTARRRYTRRKNRICYLQEIFSNEMAKVDDSFFHRLEESFLVEEDKKHERHPIFGNIVDEVAYHEKYPTIYHLRKKLVDSTDKADLRLIYLALAHMIKFRGHFLIEGDLNPDNSDVDKLFIQLVQTYNQLFEENPINASGVDAKAILSARLSKSRRLENLIAQLPGEKKNGLFGNLIALSLGLTPNFKSNFDLAEDAKLQLSKDTYDDDLDNLLAQIGDQYADLFLAAKNLSDAILLSDILRVNTEITKAPLSASMIKRYDEHHQDLTLLKALVRQQLPEKYKEIFFDQSKNGYAGYIDGGASQEEFYKFIKPILEKMDGTEELLVKLNREDLLRKQRTFDNGSIPHQIHLGELHAILRRQEDFYPFLKDNREKIEKILTFRIPYYVGPLARGNSRFAWMTRKSEETITPWNFEEVVDKGASAQSFIERMTNFDKNLPNEKVLPKHSLLYEYFTVYNELTKVKYVTEGMRKPAFLSGEQKKAIVDLLFKTNRKVTVKQLKEDYFKKIECFDSVEISGVEDRFNASLGTYHDLLKIIKDKDFLDNEENEDILEDIVLTLTLFEDREMIEERLKTYAHLFDDKVMKQLKRRRYTGWGRLSRKLINGIRDKQSGKTILDFLKSDGFANRNFMQLIHDDSLTFKEDIQKAQVSGQGDSLHEHIANLAGSPAIKKGILQTVKVVDELVKVMGRHKPENIVIEMARENQTTQKGQKNSRERMKRIEEGIKELGSQILKEHPVENTQLQNEKLYLYYLQNGRDMYVDQELDINRLSDYDVDHIVPQSFLKDDSIDNKVLTRSDKNRGKSDNVPSEEVVKKMKNYWRQLLNAKLITQRKFDNLTKAERGGLSELDKAGFIKRQLVETRQITKHVAQILDSRMNTKYDENDKLIREVKVITLKSKLVSDFRKDFQFYKVREINNYHHAHDAYLNAVVGTALIKKYPKLESEFVYGDYKVYDVRKMIAKSEQEIGKATAKYFFYSNIMNFFKTEITLANGEIRKRPLIETNGETGEIVWDKGRDFATVRKVLSMPQVNIVKKTEVQTGGFSKESILPKRNSDKLIARKKDWDPKKYGGFDSPTVAYSVLVVAKVEKGKSKKLKSVKELLGITIMERSSFEKNPIDFLEAKGYKEVKKDLIIKLPKYSLFELENGRKRMLASAGELQKGNELALPSKYVNFLYLASHYEKLKGSPEDNEQKQLFVEQHKHYLDEIIEQISEFSKRVILADANLDKVLSAYNKHRDKPIREQAENIIHLFTLTNLGAPAAFKYFDTTIDRKRYTSTKEVLDATLIHQSITGLYETRIDLSQLGGDSGGSGGSGGSTNLSDIIEKETGKQLVIQESILMLPEEVEEVIGNKPESDILVHTAYDESTDENVMLLTSDAPEYKPWALVIQDSNGENKIKMLSGGSGGSGGSTNLSDIIEKETGKQLVIQESILMLPEEVEEVIGNKPESDILVHTAYDESTDENVMLLTSDAPEYKPWALVIQDSNGENKIKMLSGGSKRTADGSEFEPKKKRKV

SEQ ID NO: 3667 - protein, 2008 aa, synthetic construct
MKRTADGSEFESPKKKRKVKPHFRNTVERMYRDTFSYNFYNRPILSRRNTVWLCYEVKTKGPSRPPLDAKIFRGQVYSELKYHPEMRFFHWFSKWRKLHRDQEYEVTWYISWSPCTKCTRDMATFLAEDPKVTLTIFVARLYYFWDPDYQEALRSLCQKRDGPRATMKIMNYDEFQHCWSKFVYSQRELFEPWNNLPKYYILLHIMLGEILRHSMDPPTFTFNFNNEPWVRGRHETYLCYEVERMHNDTWVLLNQRRGFLCNQAPHKHGFLEGRHAELCFLDVIPFWKLDLDQDYRVTCFTSWSPCFSCAQEMAKFISKNKHVSLCIFTARIYDDQGRCQEGLRTLAEAGAKISIMTYSEFKHCWDTFVDHQGCPFQPWDGLDEHSQDLSGRLRAILQNQENSGGSSGGSSGSETPGTSESATPESSGGSSGGSDKKYSIGLAIGTNSVGWAVITDEYKVPSKKFKVLGNTDRHSIKKNLIGALLFDSGETAEATRLKRTARRRYTRRKNRICYLQEIFSNEMAKVDDSFFHRLEESFLVEEDKKHERHPIFGNIVDEVAYHEKYPTIYHLRKKLVDSTDKADLRLIYLALAHMIKFRGHFLIEGDLNPDNSDVDKLFIQLVQTYNQLFEENPINASGVDAKAILSARLSKSRRLENLIAQLPGEKKNGLFGNLIALSLGLTPNFKSNFDLAEDAKLQLSKDTYDDDLDNLLAQIGDQYADLFLAAKNLSDAILLSDILRVNTEITKAPLSASMIKRYDEHHQDLTLLKALVRQQLPEKYKEIFFDQSKNGYAGYIDGGASQEEFYKFIKPILEKMDGTEELLVKLNREDLLRKQRTFDNGSIPHQIHLGELHAILRRQEDFYPFLKDNREKIEKILTFRIPYYVGPLARGNSRFAWMTRKSEETITPWNFEEVVDKGASAQSFIERMTNFDKNLPNEKVLPKHSLLYEYFTVYNELTKVKYVTEGMRKPAFLSGEQKKAIVDLLFKTNRKVTVKQLKEDYFKKIECFDSVEISGVEDRFNASLGTYHDLLKIIKDKDFLDNEENEDILEDIVLTLTLFEDREMIEERLKTYAHLFDDKVMKQLKRRRYTGWGRLSRKLINGIRDKQSGKTILDFLKSDGFANRNFMQLIHDDSLTFKEDIQKAQVSGQGDSLHEHIANLAGSPAIKKGILQTVKVVDELVKVMGRHKPENIVIEMARENQTTQKGQKNSRERMKRIEEGIKELGSQILKEHPVENTQLQNEKLYLYYLQNGRDMYVDQELDINRLSDYDVDHIVPQSFLKDDSIDNKVLTRSDKNRGKSDNVPSEEVVKKMKNYWRQLLNAKLITQRKFDNLTKAERGGLSELDKAGFIKRQLVETRQITKHVAQILDSRMNTKYDENDKLIREVKVITLKSKLVSDFRKDFQFYKVREINNYHHAHDAYLNAVVGTALIKKYPKLESEFVYGDYKVYDVRKMIAKSEQEIGKATAKYFFYSNIMNFFKTEITLANGEIRKRPLIETNGETGEIVWDKGRDFATVRKVLSMPQVNIVKKTEVQTGGFSKESILPKRNSDKLIARKKDWDPKKYGGFDSPTVAYSVLVVAKVEKGKSKKLKSVKELLGITIMERSSFEKNPIDFLEAKGYKEVKKDLIIKLPKYSLFELENGRKRMLASAGELQKGNELALPSKYVNFLYLASHYEKLKGSPEDNEQKQLFVEQHKHYLDEIIEQISEFSKRVILADANLDKVLSAYNKHRDKPIREQAENIIHLFTLTNLGAPAAFKYFDTTIDRKRYTSTKEVLDATLIHQSITGLYETRIDLSQLGGDSGGSGGSGGSTNLSDIIEKETGKQLVIQESILMLPEEVEEVIGNKPESDILVHTAYDESTDENVMLLTSDAPEYKPWALVIQDSNGENKIKMLSGGSGGSGGSTNLSDIIEKETGKQLVIQESILMLPEEVEEVIGNKPESDILVHTAYDESTDENVMLLTSDAPEYKPWALVIQDSNGENKIKMLSGGSKRTADGSEFEPKKKRKV

SEQ ID NO: 3668 - protein, 1822 aa, synthetic construct
MKRTADGSEFESPKKKRKVDSLLMNRRKFLYQFKNVRWAKGRRETYLCYVVKRRDSATSFSLDFGYLRNKNGCHVELLFLRYISDWDLDPGRCYRVTWFTSWSPCYDCARHVADFLRGNPNLSLRIFTARLYFCEDRKAEPEGLRRLHRAGVQIAIMTFKDYFYCWNTFVENHERTFKAWEGLHENSVRLSRQLRRILLPLYEVDDLRDAFRTLGLSGGSSGGSSGSETPGTSESATPESSGGSSGGSDKKYSIGLAIGTNSVGWAVITDEYKVPSKKFKVLGNTDRHSIKKNLIGALLFDSGETAEATRLKRTARRRYTRRKNRICYLQEIFSNEMAKVDDSFFHRLEESFLVEEDKKHERHPIFGNIVDEVAYHEKYPTIYHLRKKLVDSTDKADLRLIYLALAHMIKFRGHFLIEGDLNPDNSDVDKLFIQLVQTYNQLFEENPINASGVDAKAILSARLSKSRRLENLIAQLPGEKKNGLFGNLIALSLGLTPNFKSNFDLAEDAKLQLSKDTYDDDLDNLLAQIGDQYADLFLAAKNLSDAILLSDILRVNTEITKAPLSASMIKRYDEHHQDLTLLKALVRQQLPEKYKEIFFDQSKNGYAGYIDGGASQEEFYKFIKPILEKMDGTEELLVKLNREDLLRKQRTFDNGSIPHQIHLGELHAILRRQEDFYPFLKDNREKIEKILTFRIPYYVGPLARGNSRFAWMTRKSEETITPWNFEEVVDKGASAQSFIERMTNFDKNLPNEKVLPKHSLLYEYFTVYNELTKVKYVTEGMRKPAFLSGEQKKAIVDLLFKTNRKVTVKQLKEDYFKKIECFDSVEISGVEDRFNASLGTYHDLLKIIKDKDFLDNEENEDILEDIVLTLTLFEDREMIEERLKTYAHLFDDKVMKQLKRRRYTGWGRLSRKLINGIRDKQSGKTILDFLKSDGFANRNFMQLIHDDSLTFKEDIQKAQVSGQGDSLHEHIANLAGSPAIKKGILQTVKVVDELVKVMGRHKPENIVIEMARENQTTQKGQKNSRERMKRIEEGIKELGSQILKEHPVENTQLQNEKLYLYYLQNGRDMYVDQELDINRLSDYDVDHIVPQSFLKDDSIDNKVLTRSDKNRGKSDNVPSEEVVKKMKNYWRQLLNAKLITQRKFDNLTKAERGGLSELDKAGFIKRQLVETRQITKHVAQILDSRMNTKYDENDKLIREVKVITLKSKLVSDFRKDFQFYKVREINNYHHAHDAYLNAVVGTALIKKYPKLESEFVYGDYKVYDVRKMIAKSEQEIGKATAKYFFYSNIMNFFKTEITLANGEIRKRPLIETNGETGEIVWDKGRDFATVRKVLSMPQVNIVKKTEVQTGGFSKESILPKRNSDKLIARKKDWDPKKYGGFDSPTVAYSVLVVAKVEKGKSKKLKSVKELLGITIMERSSFEKNPIDFLEAKGYKEVKKDLIIKLPKYSLFELENGRKRMLASAGELQKGNELALPSKYVNFLYLASHYEKLKGSPEDNEQKQLFVEQHKHYLDEIIEQISEFSKRVILADANLDKVLSAYNKHRDKPIREQAENIIHLFTLTNLGAPAAFKYFDTTIDRKRYTSTKEVLDATLIHQSITGLYETRIDLSQLGGDSGGSGGSGGSTNLSDIIEKETGKQLVIQESILMLPEEVEEVIGNKPESDILVHTAYDESTDENVMLLTSDAPEYKPWALVIQDSNGENKIKMLSGGSGGSGGSTNLSDIIEKETGKQLVIQESILMLPEEVEEVIGNKPESDILVHTAYDESTDENVMLLTSDAPEYKPWALVIQDSNGENKIKMLSGGSKRTADGSEFEPKKKRKV

SEQ ID NO: 3669 - protein, 1832 aa, synthetic construct
MKRTADGSEFESPKKKRKVTDAEYVRIHEKLDIYTFKKQFFNNKKSVSHRCYVLFELKRRGERRACFWGYAVNKPQSGTERGIHAEIFSIRKVEEYLRDNPGQFTINWYSSWSPCADCAEKILEWYNQELRGNGHTLKIWACKLYYEKNARNQIGLWNLRDNGVGLNVMVSEHYQCCRKIFIQSSHNQLNENRWLEKTLKRAEKRRSELSIMIQVKILHTTKSPAVSGGSSGGSSGSETPGTSESATPESSGGSSGGSDKKYSIGLAIGTNSVGWAVITDEYKVPSKKFKVLGNTDRHSIKKNLIGALLFDSGETAEATRLKRTARRRYTRRKNRICYLQEIFSNEMAKVDDSFFHRLEESFLVEEDKKHERHPIFGNIVDEVAYHEKYPTIYHLRKKLVDSTDKADLRLIYLALAHMIKFRGHFLIEGDLNPDNSDVDKLFIQLVQTYNQLFEENPINASGVDAKAILSARLSKSRRLENLIAQLPGEKKNGLFGNLIALSLGLTPNFKSNFDLAEDAKLQLSKDTYDDDLDNLLAQIGDQYADLFLAAKNLSDAILLSDILRVNTEITKAPLSASMIKRYDEHHQDLTLLKALVRQQLPEKYKEIFFDQSKNGYAGYIDGGASQEEFYKFIKPILEKMDGTEELLVKLNREDLLRKQRTFDNGSIPHQIHLGELHAILRRQEDFYPFLKDNREKIEKILTFRIPYYVGPLARGNSRFAWMTRKSEETITPWNFEEVVDKGASAQSFIERMTNFDKNLPNEKVLPKHSLLYEYFTVYNELTKVKYVTEGMRKPAFLSGEQKKAIVDLLFKTNRKVTVKQLKEDYFKKIECFDSVEISGVEDRFNASLGTYHDLLKIIKDKDFLDNEENEDILEDIVLTLTLFEDREMIEERLKTYAHLFDDKVMKQLKRRRYTGWGRLSRKLINGIRDKQSGKTILDFLKSDGFANRNFMQLIHDDSLTFKEDIQKAQVSGQGDSLHEHIANLAGSPAIKKGILQTVKVVDELVKVMGRHKPENIVIEMARENQTTQKGQKNSRERMKRIEEGIKELGSQILKEHPVENTQLQNEKLYLYYLQNGRDMYVDQELDINRLSDYDVDHIVPQSFLKDDSIDNKVLTRSDKNRGKSDNVPSEEVVKKMKNYWRQLLNAKLITQRKFDNLTKAERGGLSELDKAGFIKRQLVETRQITKHVAQILDSRMNTKYDENDKLIREVKVITLKSKLVSDFRKDFQFYKVREINNYHHAHDAYLNAVVGTALIKKYPKLESEFVYGDYKVYDVRKMIAKSEQEIGKATAKYFFYSNIMNFFKTEITLANGEIRKRPLIETNGETGEIVWDKGRDFATVRKVLSMPQVNIVKKTEVQTGGFSKESILPKRNSDKLIARKKDWDPKKYGGFDSPTVAYSVLVVAKVEKGKSKKLKSVKELLGITIMERSSFEKNPIDFLEAKGYKEVKKDLIIKLPKYSLFELENGRKRMLASAGELQKGNELALPSKYVNFLYLASHYEKLKGSPEDNEQKQLFVEQHKHYLDEIIEQISEFSKRVILADANLDKVLSAYNKHRDKPIREQAENIIHLFTLTNLGAPAAFKYFDTTIDRKRYTSTKEVLDATLIHQSITGLYETRIDLSQLGGDSGGSGGSGGSTNLSDIIEKETGKQLVIQESILMLPEEVEEVIGNKPESDILVHTAYDESTDENVMLLTSDAPEYKPWALVIQDSNGENKIKMLSGGSGGSGGSTNLSDIIEKETGKQLVIQESILMLPEEVEEVIGNKPESDILVHTAYDESTDENVMLLTSDAPEYKPWALVIQDSNGENKIKMLSGGSKRTADGSEFEPKKKRKV

SEQ ID NO: 3670 - protein, 1786 aa, synthetic construct
MKRTADGSEFESPKKKRKVFERNYDPRELRKETYLLYEIKWGKSGKLWRHWCQNNRTQHAEVYFLENIFNARRFNPSTHCSITWYLSWSPCAECSQKIVDFLKEHPNVNLEIYVARLYYHEDERNRQGLRDLVNSGVTIRIMDLPDYNYCWKTFVSDQGGDEDYWPGHFAPWIKQYSLKLSGGSSGGSSGSETPGTSESATPESSGGSSGGSDKKYSIGLAIGTNSVGWAVITDEYKVPSKKFKVLGNTDRHSIKKNLIGALLFDSGETAEATRLKRTARRRYTRRKNRICYLQEIFSNEMAKVDDSFFHRLEESFLVEEDKKHERHPIFGNIVDEVAYHEKYPTIYHLRKKLVDSTDKADLRLIYLALAHMIKFRGHFLIEGDLNPDNSDVDKLFIQLVQTYNQLFEENPINASGVDAKAILSARLSKSRRLENLIAQLPGEKKNGLFGNLIALSLGLTPNFKSNFDLAEDAKLQLSKDTYDDDLDNLLAQIGDQYADLFLAAKNLSDAILLSDILRVNTEITKAPLSASMIKRYDEHHQDLTLLKALVRQQLPEKYKEIFFDQSKNGYAGYIDGGASQEEFYKFIKPILEKMDGTEELLVKLNREDLLRKQRTFDNGSIPHQIHLGELHAILRRQEDFYPFLKDNREKIEKILTFRIPYYVGPLARGNSRFAWMTRKSEETITPWNFEEVVDKGASAQSFIERMTNFDKNLPNEKVLPKHSLLYEYFTVYNELTKVKYVTEGMRKPAFLSGEQKKAIVDLLFKTNRKVTVKQLKEDYFKKIECFDSVEISGVEDRFNASLGTYHDLLKIIKDKDFLDNEENEDILEDIVLTLTLFEDREMIEERLKTYAHLFDDKVMKQLKRRRYTGWGRLSRKLINGIRDKQSGKTILDFLKSDGFANRNFMQLIHDDSLTFKEDIQKAQVSGQGDSLHEHIANLAGSPAIKKGILQTVKVVDELVKVMGRHKPENIVIEMARENQTTQKGQKNSRERMKRIEEGIKELGSQILKEHPVENTQLQNEKLYLYYLQNGRDMYVDQELDINRLSDYDVDHIVPQSFLKDDSIDNKVLTRSDKNRGKSDNVPSEEVVKKMKNYWRQLLNAKLITQRKFDNLTKAERGGLSELDKAGFIKRQLVETRQITKHVAQILDSRMNTKYDENDKLIREVKVITLKSKLVSDFRKDFQFYKVREINNYHHAHDAYLNAVVGTALIKKYPKLESEFVYGDYKVYDVRKMIAKSEQEIGKATAKYFFYSNIMNFFKTEITLANGEIRKRPLIETNGETGEIVWDKGRDFATVRKVLSMPQVNIVKKTEVQTGGFSKESILPKRNSDKLIARKKDWDPKKYGGFDSPTVAYSVLVVAKVEKGKSKKLKSVKELLGITIMERSSFEKNPIDFLEAKGYKEVKKDLIIKLPKYSLFELENGRKRMLASAGELQKGNELALPSKYVNFLYLASHYEKLKGSPEDNEQKQLFVEQHKHYLDEIIEQISEFSKRVILADANLDKVLSAYNKHRDKPIREQAENIIHLFTLTNLGAPAAFKYFDTTIDRKRYTSTKEVLDATLIHQSITGLYETRIDLSQLGGDSGGSGGSGGSTNLSDIIEKETGKQLVIQESILMLPEEVEEVIGNKPESDILVHTAYDESTDENVMLLTSDAPEYKPWALVIQDSNGENKIKMLSGGSGGSGGSTNLSDIIEKETGKQLVIQESILMLPEEVEEVIGNKPESDILVHTAYDESTDENVMLLTSDAPEYKPWALVIQDSNGENKIKMLSGGSKRTADGSEFEPKKKRKV

SEQ ID NO: 3671 - protein, 1823 aa, synthetic construct
MKRTADGSEFESPKKKRKVEASPASGPRHLMDPHIFTSNFNNGIGRHKTYLCYEVERLDNGTSVKMDQHRGFLHGQAKNLLCGFYGRHAELRFLDLVPSLQLDPAQIYRVTWFISWSPCFSWGCAGEVRAFLQENTHVRLRIFAARIYDYDPLYKEALQMLRDAGAQVSIMTYDEFKHCWDTFVDHQGCPFQPWDGLDEHSQALSGRLRAILQNQGNSGGSSGGSSGSETPGTSESATPESSGGSSGGSDKKYSIGLAIGTNSVGWAVITDEYKVPSKKFKVLGNTDRHSIKKNLIGALLFDSGETAEATRLKRTARRRYTRRKNRICYLQEIFSNEMAKVDDSFFHRLEESFLVEEDKKHERHPIFGNIVDEVAYHEKYPTIYHLRKKLVDSTDKADLRLIYLALAHMIKFRGHFLIEGDLNPDNSDVDKLFIQLVQTYNQLFEENPINASGVDAKAILSARLSKSRRLENLIAQLPGEKKNGLFGNLIALSLGLTPNFKSNFDLAEDAKLQLSKDTYDDDLDNLLAQIGDQYADLFLAAKNLSDAILLSDILRVNTEITKAPLSASMIKRYDEHHQDLTLLKALVRQQLPEKYKEIFFDQSKNGYAGYIDGGASQEEFYKFIKPILEKMDGTEELLVKLNREDLLRKQRTFDNGSIPHQIHLGELHAILRRQEDFYPFLKDNREKIEKILTFRIPYYVGPLARGNSRFAWMTRKSEETITPWNFEEVVDKGASAQSFIERMTNFDKNLPNEKVLPKHSLLYEYFTVYNELTKVKYVTEGMRKPAFLSGEQKKAIVDLLFKTNRKVTVKQLKEDYFKKIECFDSVEISGVEDRFNASLGTYHDLLKIIKDKDFLDNEENEDILEDIVLTLTLFEDREMIEERLKTYAHLFDDKVMKQLKRRRYTGWGRLSRKLINGIRDKQSGKTILDFLKSDGFANRNFMQLIHDDSLTFKEDIQKAQVSGQGDSLHEHIANLAGSPAIKKGILQTVKVVDELVKVMGRHKPENIVIEMARENQTTQKGQKNSRERMKRIEEGIKELGSQILKEHPVENTQLQNEKLYLYYLQNGRDMYVDQELDINRLSDYDVDHIVPQSFLKDDSIDNKVLTRSDKNRGKSDNVPSEEVVKKMKNYWRQLLNAKLITQRKFDNLTKAERGGLSELDKAGFIKRQLVETRQITKHVAQILDSRMNTKYDENDKLIREVKVITLKSKLVSDFRKDFQFYKVREINNYHHAHDAYLNAVVGTALIKKYPKLESEFVYGDYKVYDVRKMIAKSEQEIGKATAKYFFYSNIMNFFKTEITLANGEIRKRPLIETNGETGEIVWDKGRDFATVRKVLSMPQVNIVKKTEVQTGGFSKESILPKRNSDKLIARKKDWDPKKYGGFDSPTVAYSVLVVAKVEKGKSKKLKSVKELLGITIMERSSFEKNPIDFLEAKGYKEVKKDLIIKLPKYSLFELENGRKRMLASAGELQKGNELALPSKYVNFLYLASHYEKLKGSPEDNEQKQLFVEQHKHYLDEIIEQISEFSKRVILADANLDKVLSAYNKHRDKPIREQAENIIHLFTLTNLGAPAAFKYFDTTIDRKRYTSTKEVLDATLIHQSITGLYETRIDLSQLGGDSGGSGGSGGSTNLSDIIEKETGKQLVIQESILMLPEEVEEVIGNKPESDILVHTAYDESTDENVMLLTSDAPEYKPWALVIQDSNGENKIKMLSGGSGGSGGSTNLSDIIEKETGKQLVIQESILMLPEEVEEVIGNKPESDILVHTAYDESTDENVMLLTSDAPEYKPWALVIQDSNGENKIKMLSGGSKRTADGSEFEPKKKRKV

SEQ ID NO: 3672 - protein, 1853 aa, synthetic construct
MKRTADGSEFESPKKKRKVSSETGPVAVDPTLRRRIEPHEFEVFFDPRELAAETCLLYEINWGGRHSIWRHTSQNTNKHVEVNFIEKFTTERYFCPNTRCSITWFLSWSPCGECSRAITEFLSRYPHVTLFIYIARLYHLANPRNRQGLRDLISSGVTIQIMTEQESGYCWRNFVNYSPSNEAHWPRYPHLWVRLYVLELYCIILGLPPCLNILRRKQPQLTFFTIALQSCHYQRLPPHILWATGLKSGGSSGGSSGSETPGTSESATPESSGGSSGGSDKKYSIGLAIGTNSVGWAVITDEYKVPSKKFKVLGNTDRHSIKKNLIGALLFDSGETAEATRLKRTARRRYTRRKNRICYLQEIFSNEMAKVDDSFFHRLEESFLVEEDKKHERHPIFGNIVDEVAYHEKYPTIYHLRKKLVDSTDKADLRLIYLALAHMIKFRGHFLIEGDLNPDNSDVDKLFIQLVQTYNQLFEENPINASGVDAKAILSARLSKSRRLENLIAQLPGEKKNGLFGNLIALSLGLTPNFKSNFDLAEDAKLQLSKDTYDDDLDNLLAQIGDQYADLFLAAKNLSDAILLSDILRVNTEITKAPLSASMIKRYDEHHQDLTLLKALVRQQLPEKYKEIFFDQSKNGYAGYIDGGASQEEFYKFIKPILEKMDGTEELLVKLNREDLLRKQRTFDNGSIPHQIHLGELHAILRRQEDFYPFLKDNREKIEKILTFRIPYYVGPLARGNSRFAWMTRKSEETITPWNFEEVVDKGASAQSFIERMTNFDKNLPNEKVLPKHSLLYEYFTVYNELTKVKYVTEGMRKPAFLSGEQKKAIVDLLFKTNRKVTVKQLKEDYFKKIECFDSVEISGVEDRFNASLGTYHDLLKIIKDKDFLDNEENEDILEDIVLTLTLFEDREMIEERLKTYAHLFDDKVMKQLKRRRYTGWGRLSRKLINGIRDKQSGKTILDFLKSDGFANRNFMQLIHDDSLTFKEDIQKAQVSGQGDSLHEHIANLAGSPAIKKGILQTVKVVDELVKVMGRHKPENIVIEMARENQTTQKGQKNSRERMKRIEEGIKELGSQILKEHPVENTQLQNEKLYLYYLQNGRDMYVDQELDINRLSDYDVDHIVPQSFLKDDSIDNKVLTRSDKNRGKSDNVPSEEVVKKMKNYWRQLLNAKLITQRKFDNLTKAERGGLSELDKAGFIKRQLVETRQITKHVAQILDSRMNTKYDENDKLIREVKVITLKSKLVSDFRKDFQFYKVREINNYHHAHDAYLNAVVGTALIKKYPKLESEFVYGDYKVYDVRKMIAKSEQEIGKATAKYFFYSNIMNFFKTEITLANGEIRKRPLIETNGETGEIVWDKGRDFATVRKVLSMPQVNIVKKTEVQTGGFSKESILPKRNSDKLIARKKDWDPKKYGGFDSPTVAYSVLVVAKVEKGKSKKLKSVKELLGITIMERSSFEKNPIDFLEAKGYKEVKKDLIIKLPKYSLFELENGRKRMLASAGELQKGNELALPSKYVNFLYLASHYEKLKGSPEDNEQKQLFVEQHKHYLDEIIEQISEFSKRVILADANLDKVLSAYNKHRDKPIREQAENIIHLFTLTNLGAPAAFKYFDTTIDRKRYTSTKEVLDATLIHQSITGLYETRIDLSQLGGDSGGSGGSGGSTNLSDIIEKETGKQLVIQESILMLPEEVEEVIGNKPESDILVHTAYDESTDENVMLLTSDAPEYKPWALVIQDSNGENKIKMLSGGSGGSGGSTNLSDIIEKETGKQLVIQESILMLPEEVEEVIGNKPESDILVHTAYDESTDENVMLLTSDAPEYKPWALVIQDSNGENKIKMLSGGSKRTADGSEFEPKKKRKV

SEQ ID NO: 3673 - protein, 1853 aa, synthetic construct
MKRTADGSEFESPKKKRKVSSETGPVAVDPTLRRRIEPHEFEVFFDPRELRKETCLLYEINWGGRHSIWRHTSQNTNKHVEVNFIEKFTTERYFCPNTRCSITWFLSWSPCGECSRAITEFLSRYPHVTLFIYIARLYHHADPRNRQGLRDLISSGVTIQIMTEQESGYCWRNFVNYSPSNEAHWPRYPHLWVRLYVLELYCIILGLPPCLNILRRKQPQLTFFTIALQSCHYQRLPPHILWATGLKSGGSSGGSSGSETPGTSESATPESSGGSSGGSDKKYSIGLAIGTNSVGWAVITDEYKVPSKKFKVLGNTDRHSIKKNLIGALLFDSGETAEATRLKRTARRRYTRRKNRICYLQEIFSNEMAKVDDSFFHRLEESFLVEEDKKHERHPIFGNIVDEVAYHEKYPTIYHLRKKLVDSTDKADLRLIYLALAHMIKFRGHFLIEGDLNPDNSDVDKLFIQLVQTYNQLFEENPINASGVDAKAILSARLSKSRRLENLIAQLPGEKKNGLFGNLIALSLGLTPNFKSNFDLAEDAKLQLSKDTYDDDLDNLLAQIGDQYADLFLAAKNLSDAILLSDILRVNTEITKAPLSASMIKRYDEHHQDLTLLKALVRQQLPEKYKEIFFDQSKNGYAGYIDGGASQEEFYKFIKPILEKMDGTEELLVKLNREDLLRKQRTFDNGSIPHQIHLGELHAILRRQEDFYPFLKDNREKIEKILTFRIPYYVGPLARGNSRFAWMTRKSEETITPWNFEEVVDKGASAQSFIERMTNFDKNLPNEKVLPKHSLLYEYFTVYNELTKVKYVTEGMRKPAFLSGEQKKAIVDLLFKTNRKVTVKQLKEDYFKKIECFDSVEISGVEDRFNASLGTYHDLLKIIKDKDFLDNEENEDILEDIVLTLTLFEDREMIEERLKTYAHLFDDKVMKQLKRRRYTGWGRLSRKLINGIRDKQSGKTILDFLKSDGFANRNFMQLIHDDSLTFKEDIQKAQVSGQGDSLHEHIANLAGSPAIKKGILQTVKVVDELVKVMGRHKPENIVIEMARENQTTQKGQKNSRERMKRIEEGIKELGSQILKEHPVENTQLQNEKLYLYYLQNGRDMYVDQELDINRLSDYDVDHIVPQSFLKDDSIDNKVLTRSDKNRGKSDNVPSEEVVKKMKNYWRQLLNAKLITQRKFDNLTKAERGGLSELDKAGFIKRQLVETRQITKHVAQILDSRMNTKYDENDKLIREVKVITLKSKLVSDFRKDFQFYKVREINNYHHAHDAYLNAVVGTALIKKYPKLESEFVYGDYKVYDVRKMIAKSEQEIGKATAKYFFYSNIMNFFKTEITLANGEIRKRPLIETNGETGEIVWDKGRDFATVRKVLSMPQVNIVKKTEVQTGGFSKESIRPKRNSDKLIARKKDWDPKKYGGFVSPTVAYSVLVVAKVEKGKSKKLKSVKELLGITIMERSSFEKNPIDFLEAKGYKEVKKDLIIKLPKYSLFELENGRKRMLASARFLQKGNELALPSKYVNFLYLASHYEKLKGSPEDNEQKQLFVEQHKHYLDEIIEQISEFSKRVILADANLDKVLSAYNKHRDKPIREQAENIIHLFTLTNLGAPRAFKYFDTTIDRKVYRSTKEVLDATLIHQSITGLYETRIDLSQLGGDSGGSGGSGGSTNLSDIIEKETGKQLVIQESILMLPEEVEEVIGNKPESDILVHTAYDESTDENVMLLTSDAPEYKPWALVIQDSNGENKIKMLSGGSGGSGGSTNLSDIIEKETGKQLVIQESILMLPEEVEEVIGNKPESDILVHTAYDESTDENVMLLTSDAPEYKPWALVIQDSNGENKIKMLSGGSKRTADGSEFEPKKKRKV

SEQ ID NO: 3674 - protein, 1853 aa, synthetic construct
MKRTADGSEFESPKKKRKVSSETGPVAVDPTLRRRIEPHEFEVFFDPRELRKETCLLYEINWGGRHSIWRHTSQNTNKHVEVNFIEKFTTERYFCPNTRCSITWFLSYSPCGECSRAITEFLSRYPHVTLFIYIARLYHHADPENRQGLRDLISSGVTIQIMTEQESGYCWRNFVNYSPSNEAHWPRYPHLWVRLYVLELYCIILGLPPCLNILRRKQPQLTFFTIALQSCHYQRLPPHILWATGLKSGGSSGGSSGSETPGTSESATPESSGGSSGGSDKKYSIGLAIGTNSVGWAVITDEYKVPSKKFKVLGNTDRHSIKKNLIGALLFDSGETAEATRLKRTARRRYTRRKNRICYLQEIFSNEMAKVDDSFFHRLEESFLVEEDKKHERHPIFGNIVDEVAYHEKYPTIYHLRKKLVDSTDKADLRLIYLALAHMIKFRGHFLIEGDLNPDNSDVDKLFIQLVQTYNQLFEENPINASGVDAKAILSARLSKSRRLENLIAQLPGEKKNGLFGNLIALSLGLTPNFKSNFDLAEDAKLQLSKDTYDDDLDNLLAQIGDQYADLFLAAKNLSDAILLSDILRVNTEITKAPLSASMIKRYDEHHQDLTLLKALVRQQLPEKYKEIFFDQSKNGYAGYIDGGASQEEFYKFIKPILEKMDGTEELLVKLNREDLLRKQRTFDNGSIPHQIHLGELHAILRRQEDFYPFLKDNREKIEKILTFRIPYYVGPLARGNSRFAWMTRKSEETITPWNFEEVVDKGASAQSFIERMTNFDKNLPNEKVLPKHSLLYEYFTVYNELTKVKYVTEGMRKPAFLSGEQKKAIVDLLFKTNRKVTVKQLKEDYFKKIECFDSVEISGVEDRFNASLGTYHDLLKIIKDKDFLDNEENEDILEDIVLTLTLFEDREMIEERLKTYAHLFDDKVMKQLKRRRYTGWGRLSRKLINGIRDKQSGKTILDFLKSDGFANRNFMQLIHDDSLTFKEDIQKAQVSGQGDSLHEHIANLAGSPAIKKGILQTVKVVDELVKVMGRHKPENIVIEMARENQTTQKGQKNSRERMKRIEEGIKELGSQILKEHPVENTQLQNEKLYLYYLQNGRDMYVDQELDINRLSDYDVDHIVPQSFLKDDSIDNKVLTRSDKNRGKSDNVPSEEVVKKMKNYWRQLLNAKLITQRKFDNLTKAERGGLSELDKAGFIKRQLVETRQITKHVAQILDSRMNTKYDENDKLIREVKVITLKSKLVSDFRKDFQFYKVREINNYHHAHDAYLNAVVGTALIKKYPKLESEFVYGDYKVYDVRKMIAKSEQEIGKATAKYFFYSNIMNFFKTEITLANGEIRKRPLIETNGETGEIVWDKGRDFATVRKVLSMPQVNIVKKTEVQTGGFSKESIRPKRNSDKLIARKKDWDPKKYGGFVSPTVAYSVLVVAKVEKGKSKKLKSVKELLGITIMERSSFEKNPIDFLEAKGYKEVKKDLIIKLPKYSLFELENGRKRMLASARFLQKGNELALPSKYVNFLYLASHYEKLKGSPEDNEQKQLFVEQHKHYLDEIIEQISEFSKRVILADANLDKVLSAYNKHRDKPIREQAENIIHLFTLTNLGAPRAFKYFDTTIDRKVYRSTKEVLDATLIHQSITGLYETRIDLSQLGGDSGGSGGSGGSTNLSDIIEKETGKQLVIQESILMLPEEVEEVIGNKPESDILVHTAYDESTDENVMLLTSDAPEYKPWALVIQDSNGENKIKMLSGGSGGSGGSTNLSDIIEKETGKQLVIQESILMLPEEVEEVIGNKPESDILVHTAYDESTDENVMLLTSDAPEYKPWALVIQDSNGENKIKMLSGGSKRTADGSEFEPKKKRKV

SEQ ID NO: 3675 - protein, 1853 aa, synthetic construct
MKRTADGSEFESPKKKRKVSSETGPVAVDPTLRRRIEPHEFEVFFDPRELRKETCLLYEINWGGRHSIWRHTSQNTNKHVEVNFIEKFTTERYFCPNTRCSITWFLSYSPCGECSRAITEFLSRYPHVTLFIYIARLYHHADPRNRQGLEDLISSGVTIQIMTEQESGYCWRNFVNYSPSNEAHWPRYPHLWVRLYVLELYCIILGLPPCLNILRRKQPQLTFFTIALQSCHYQRLPPHILWATGLKSGGSSGGSSGSETPGTSESATPESSGGSSGGSDKKYSIGLAIGTNSVGWAVITDEYKVPSKKFKVLGNTDRHSIKKNLIGALLFDSGETAEATRLKRTARRRYTRRKNRICYLQEIFSNEMAKVDDSFFHRLEESFLVEEDKKHERHPIFGNIVDEVAYHEKYPTIYHLRKKLVDSTDKADLRLIYLALAHMIKFRGHFLIEGDLNPDNSDVDKLFIQLVQTYNQLFEENPINASGVDAKAILSARLSKSRRLENLIAQLPGEKKNGLFGNLIALSLGLTPNFKSNFDLAEDAKLQLSKDTYDDDLDNLLAQIGDQYADLFLAAKNLSDAILLSDILRVNTEITKAPLSASMIKRYDEHHQDLTLLKALVRQQLPEKYKEIFFDQSKNGYAGYIDGGASQEEFYKFIKPILEKMDGTEELLVKLNREDLLRKQRTFDNGSIPHQIHLGELHAILRRQEDFYPFLKDNREKIEKILTFRIPYYVGPLARGNSRFAWMTRKSEETITPWNFEEVVDKGASAQSFIERMTNFDKNLPNEKVLPKHSLLYEYFTVYNELTKVKYVTEGMRKPAFLSGEQKKAIVDLLFKTNRKVTVKQLKEDYFKKIECFDSVEISGVEDRFNASLGTYHDLLKIIKDKDFLDNEENEDILEDIVLTLTLFEDREMIEERLKTYAHLFDDKVMKQLKRRRYTGWGRLSRKLINGIRDKQSGKTILDFLKSDGFANRNFMQLIHDDSLTFKEDIQKAQVSGQGDSLHEHIANLAGSPAIKKGILQTVKVVDELVKVMGRHKPENIVIEMARENQTTQKGQKNSRERMKRIEEGIKELGSQILKEHPVENTQLQNEKLYLYYLQNGRDMYVDQELDINRLSDYDVDHIVPQSFLKDDSIDNKVLTRSDKNRGKSDNVPSEEVVKKMKNYWRQLLNAKLITQRKFDNLTKAERGGLSELDKAGFIKRQLVETRQITKHVAQILDSRMNTKYDENDKLIREVKVITLKSKLVSDFRKDFQFYKVREINNYHHAHDAYLNAVVGTALIKKYPKLESEFVYGDYKVYDVRKMIAKSEQEIGKATAKYFFYSNIMNFFKTEITLANGEIRKRPLIETNGETGEIVWDKGRDFATVRKVLSMPQVNIVKKTEVQTGGFSKESIRPKRNSDKLIARKKDWDPKKYGGFVSPTVAYSVLVVAKVEKGKSKKLKSVKELLGITIMERSSFEKNPIDFLEAKGYKEVKKDLIIKLPKYSLFELENGRKRMLASARFLQKGNELALPSKYVNFLYLASHYEKLKGSPEDNEQKQLFVEQHKHYLDEIIEQISEFSKRVILADANLDKVLSAYNKHRDKPIREQAENIIHLFTLTNLGAPRAFKYFDTTIDRKVYRSTKEVLDATLIHQSITGLYETRIDLSQLGGDSGGSGGSGGSTNLSDIIEKETGKQLVIQESILMLPEEVEEVIGNKPESDILVHTAYDESTDENVMLLTSDAPEYKPWALVIQDSNGENKIKMLSGGSGGSGGSTNLSDIIEKETGKQLVIQESILMLPEEVEEVIGNKPESDILVHTAYDESTDENVMLLTSDAPEYKPWALVIQDSNGENKIKMLSGGSKRTADGSEFEPKKKRKV

SEQ ID NO: 3676 - protein, 1853 aa, synthetic construct
MKRTADGSEFESPKKKRKVSSETGPVAVDPTLRRRIEPHEFEVFFDPRELRKETCLLYEINWGGRHSIWRHTSQNTNKHVEVNFIEKFTTERYFCPNTRCSITWFLSYSPCGECSRAITEFLSRYPHVTLFIYIARLYHHADPENRQGLEDLISSGVTIQIMTEQESGYCWRNFVNYSPSNEAHWPRYPHLWVRLYVLELYCIILGLPPCLNILRRKQPQLTFFTIALQSCHYQRLPPHILWATGLKSGGSSGGSSGSETPGTSESATPESSGGSSGGSDKKYSIGLAIGTNSVGWAVITDEYKVPSKKFKVLGNTDRHSIKKNLIGALLFDSGETAEATRLKRTARRRYTRRKNRICYLQEIFSNEMAKVDDSFFHRLEESFLVEEDKKHERHPIFGNIVDEVAYHEKYPTIYHLRKKLVDSTDKADLRLIYLALAHMIKFRGHFLIEGDLNPDNSDVDKLFIQLVQTYNQLFEENPINASGVDAKAILSARLSKSRRLENLIAQLPGEKKNGLFGNLIALSLGLTPNFKSNFDLAEDAKLQLSKDTYDDDLDNLLAQIGDQYADLFLAAKNLSDAILLSDILRVNTEITKAPLSASMIKRYDEHHQDLTLLKALVRQQLPEKYKEIFFDQSKNGYAGYIDGGASQEEFYKFIKPILEKMDGTEELLVKLNREDLLRKQRTFDNGSIPHQIHLGELHAILRRQEDFYPFLKDNREKIEKILTFRIPYYVGPLARGNSRFAWMTRKSEETITPWNFEEVVDKGASAQSFIERMTNFDKNLPNEKVLPKHSLLYEYFTVYNELTKVKYVTEGMRKPAFLSGEQKKAIVDLLFKTNRKVTVKQLKEDYFKKIECFDSVEISGVEDRFNASLGTYHDLLKIIKDKDFLDNEENEDILEDIVLTLTLFEDREMIEERLKTYAHLFDDKVMKQLKRRRYTGWGRLSRKLINGIRDKQSGKTILDFLKSDGFANRNFMQLIHDDSLTFKEDIQKAQVSGQGDSLHEHIANLAGSPAIKKGILQTVKVVDELVKVMGRHKPENIVIEMARENQTTQKGQKNSRERMKRIEEGIKELGSQILKEHPVENTQLQNEKLYLYYLQNGRDMYVDQELDINRLSDYDVDHIVPQSFLKDDSIDNKVLTRSDKNRGKSDNVPSEEVVKKMKNYWRQLLNAKLITQRKFDNLTKAERGGLSELDKAGFIKRQLVETRQITKHVAQILDSRMNTKYDENDKLIREVKVITLKSKLVSDFRKDFQFYKVREINNYHHAHDAYLNAVVGTALIKKYPKLESEFVYGDYKVYDVRKMIAKSEQEIGKATAKYFFYSNIMNFFKTEITLANGEIRKRPLIETNGETGEIVWDKGRDFATVRKVLSMPQVNIVKKTEVQTGGFSKESIRPKRNSDKLIARKKDWDPKKYGGFVSPTVAYSVLVVAKVEKGKSKKLKSVKELLGITIMERSSFEKNPIDFLEAKGYKEVKKDLIIKLPKYSLFELENGRKRMLASARFLQKGNELALPSKYVNFLYLASHYEKLKGSPEDNEQKQLFVEQHKHYLDEIIEQISEFSKRVILADANLDKVLSAYNKHRDKPIREQAENIIHLFTLTNLGAPRAFKYFDTTIDRKVYRSTKEVLDATLIHQSITGLYETRIDLSQLGGDSGGSGGSGGSTNLSDIIEKETGKQLVIQESILMLPEEVEEVIGNKPESDILVHTAYDESTDENVMLLTSDAPEYKPWALVIQDSNGENKIKMLSGGSGGSGGSTNLSDIIEKETGKQLVIQESILMLPEEVEEVIGNKPESDILVHTAYDESTDENVMLLTSDAPEYKPWALVIQDSNGENKIKMLSGGSKRTADGSEFEPKKKRKV

SEQ ID NO: 3677 - protein, 1853 aa, synthetic construct
MKRTADGSEFESPKKKRKVSSETGPVAVDPTLRRRIEPHEFEVFFDPRELRKETCLLYEINWGGRHSIWRHTSQNTNKHVEVNFIEKFTTERYFCPNTRCSITWFLSWSPCGECSRAITEFLSRYPHVTLFIYIARLYHHADPENRQGLEDLISSGVTIQIMTEQESGYCWRNFVNYSPSNEAHWPRYPHLWVRLYVLELYCIILGLPPCLNILRRKQPQLTFFTIALQSCHYQRLPPHILWATGLKSGGSSGGSSGSETPGTSESATPESSGGSSGGSDKKYSIGLAIGTNSVGWAVITDEYKVPSKKFKVLGNTDRHSIKKNLIGALLFDSGETAEATRLKRTARRRYTRRKNRICYLQEIFSNEMAKVDDSFFHRLEESFLVEEDKKHERHPIFGNIVDEVAYHEKYPTIYHLRKKLVDSTDKADLRLIYLALAHMIKFRGHFLIEGDLNPDNSDVDKLFIQLVQTYNQLFEENPINASGVDAKAILSARLSKSRRLENLIAQLPGEKKNGLFGNLIALSLGLTPNFKSNFDLAEDAKLQLSKDTYDDDLDNLLAQIGDQYADLFLAAKNLSDAILLSDILRVNTEITKAPLSASMIKRYDEHHQDLTLLKALVRQQLPEKYKEIFFDQSKNGYAGYIDGGASQEEFYKFIKPILEKMDGTEELLVKLNREDLLRKQRTFDNGSIPHQIHLGELHAILRRQEDFYPFLKDNREKIEKILTFRIPYYVGPLARGNSRFAWMTRKSEETITPWNFEEVVDKGASAQSFIERMTNFDKNLPNEKVLPKHSLLYEYFTVYNELTKVKYVTEGMRKPAFLSGEQKKAIVDLLFKTNRKVTVKQLKEDYFKKIECFDSVEISGVEDRFNASLGTYHDLLKIIKDKDFLDNEENEDILEDIVLTLTLFEDREMIEERLKTYAHLFDDKVMKQLKRRRYTGWGRLSRKLINGIRDKQSGKTILDFLKSDGFANRNFMQLIHDDSLTFKEDIQKAQVSGQGDSLHEHIANLAGSPAIKKGILQTVKVVDELVKVMGRHKPENIVIEMARENQTTQKGQKNSRERMKRIEEGIKELGSQILKEHPVENTQLQNEKLYLYYLQNGRDMYVDQELDINRLSDYDVDHIVPQSFLKDDSIDNKVLTRSDKNRGKSDNVPSEEVVKKMKNYWRQLLNAKLITQRKFDNLTKAERGGLSELDKAGFIKRQLVETRQITKHVAQILDSRMNTKYDENDKLIREVKVITLKSKLVSDFRKDFQFYKVREINNYHHAHDAYLNAVVGTALIKKYPKLESEFVYGDYKVYDVRKMIAKSEQEIGKATAKYFFYSNIMNFFKTEITLANGEIRKRPLIETNGETGEIVWDKGRDFATVRKVLSMPQVNIVKKTEVQTGGFSKESIRPKRNSDKLIARKKDWDPKKYGGFVSPTVAYSVLVVAKVEKGKSKKLKSVKELLGITIMERSSFEKNPIDFLEAKGYKEVKKDLIIKLPKYSLFELENGRKRMLASARFLQKGNELALPSKYVNFLYLASHYEKLKGSPEDNEQKQLFVEQHKHYLDEIIEQISEFSKRVILADANLDKVLSAYNKHRDKPIREQAENIIHLFTLTNLGAPRAFKYFDTTIDRKVYRSTKEVLDATLIHQSITGLYETRIDLSQLGGDSGGSGGSGGSTNLSDIIEKETGKQLVIQESILMLPEEVEEVIGNKPESDILVHTAYDESTDENVMLLTSDAPEYKPWALVIQDSNGENKIKMLSGGSGGSGGSTNLSDIIEKETGKQLVIQESILMLPEEVEEVIGNKPESDILVHTAYDESTDENVMLLTSDAPEYKPWALVIQDSNGENKIKMLSGGSKRTADGSEFEPKKKRKV

SEQ ID NO: 3678 - protein, 1853 aa, synthetic construct
MKRTADGSEFESPKKKRKVSSETGPVAVDPTLRRRIEPHEFEVFFDPRELAAETCLLYEINWGGRHSIWRHTSQNTNKHVEVNFIEKFTTERYFCPNTRCSITWFLSWSPCGECSRAITEFLSRYPHVTLFIYIARLYHHADPRNRQGLRDLISSGVTIQIMTEQESGYCWRNFVNYSPSNEAHWPRYPHLWVRLYVLELYCIILGLPPCLNILRRKQPQLTFFTIALQSCHYQRLPPHILWATGLKSGGSSGGSSGSETPGTSESATPESSGGSSGGSDKKYSIGLAIGTNSVGWAVITDEYKVPSKKFKVLGNTDRHSIKKNLIGALLFDSGETAEATRLKRTARRRYTRRKNRICYLQEIFSNEMAKVDDSFFHRLEESFLVEEDKKHERHPIFGNIVDEVAYHEKYPTIYHLRKKLVDSTDKADLRLIYLALAHMIKFRGHFLIEGDLNPDNSDVDKLFIQLVQTYNQLFEENPINASGVDAKAILSARLSKSRRLENLIAQLPGEKKNGLFGNLIALSLGLTPNFKSNFDLAEDAKLQLSKDTYDDDLDNLLAQIGDQYADLFLAAKNLSDAILLSDILRVNTEITKAPLSASMIKRYDEHHQDLTLLKALVRQQLPEKYKEIFFDQSKNGYAGYIDGGASQEEFYKFIKPILEKMDGTEELLVKLNREDLLRKQRTFDNGSIPHQIHLGELHAILRRQEDFYPFLKDNREKIEKILTFRIPYYVGPLARGNSRFAWMTRKSEETITPWNFEEVVDKGASAQSFIERMTNFDKNLPNEKVLPKHSLLYEYFTVYNELTKVKYVTEGMRKPAFLSGEQKKAIVDLLFKTNRKVTVKQLKEDYFKKIECFDSVEISGVEDRFNASLGTYHDLLKIIKDKDFLDNEENEDILEDIVLTLTLFEDREMIEERLKTYAHLFDDKVMKQLKRRRYTGWGRLSRKLINGIRDKQSGKTILDFLKSDGFANRNFMQLIHDDSLTFKEDIQKAQVSGQGDSLHEHIANLAGSPAIKKGILQTVKVVDELVKVMGRHKPENIVIEMARENQTTQKGQKNSRERMKRIEEGIKELGSQILKEHPVENTQLQNEKLYLYYLQNGRDMYVDQELDINRLSDYDVDHIVPQSFLKDDSIDNKVLTRSDKNRGKSDNVPSEEVVKKMKNYWRQLLNAKLITQRKFDNLTKAERGGLSELDKAGFIKRQLVETRQITKHVAQILDSRMNTKYDENDKLIREVKVITLKSKLVSDFRKDFQFYKVREINNYHHAHDAYLNAVVGTALIKKYPKLESEFVYGDYKVYDVRKMIAKSEQEIGKATAKYFFYSNIMNFFKTEITLANGEIRKRPLIETNGETGEIVWDKGRDFATVRKVLSMPQVNIVKKTEVQTGGFSKESIRPKRNSDKLIARKKDWDPKKYGGFVSPTVAYSVLVVAKVEKGKSKKLKSVKELLGITIMERSSFEKNPIDFLEAKGYKEVKKDLIIKLPKYSLFELENGRKRMLASARFLQKGNELALPSKYVNFLYLASHYEKLKGSPEDNEQKQLFVEQHKHYLDEIIEQISEFSKRVILADANLDKVLSAYNKHRDKPIREQAENIIHLFTLTNLGAPRAFKYFDTTIDRKVYRSTKEVLDATLIHQSITGLYETRIDLSQLGGDSGGSGGSGGSTNLSDIIEKETGKQLVIQESILMLPEEVEEVIGNKPESDILVHTAYDESTDENVMLLTSDAPEYKPWALVIQDSNGENKIKMLSGGSGGSGGSTNLSDIIEKETGKQLVIQESILMLPEEVEEVIGNKPESDILVHTAYDESTDENVMLLTSDAPEYKPWALVIQDSNGENKIKMLSGGSKRTADGSEFEPKKKRKV

SEQ ID NO: 3679 - protein, 1874 aa, synthetic construct
MKRTADGSEFESPKKKRKVSSETGPVAVDPTLRRRIEPHEFEVFFDPRELRKETCLLYEINWGGRHSIWRHTSQNTNKHVEVNFIEKFTTERYFCPNTRCSITWFLSYSPCGECSRAITEFLSRYPHVTLFIYIARLYHHADPENRQGLRDLISSGVTIQIMTEQESGYCWRNFVNYSPSNEAHWPRYPHLWVRLYVLELYCIILGLPPCLNILRRKQPQLTFFTIALQSCHYQRLPPHILWATGLKSGGSSGGSSGSETPGTSESATPESSGGSSGGSEIGKATAKYFFYSNIMNFFKTEITLANGEIRKRPLIETNGETGEIVWDKGRDFATVRKVLSMPQVNIVKKTEVQTGGFSKESILPKRNSDKLIARKKDWDPKKYGGFDSPTVAYSVLVVAKVEKGKSKKLKSVKELLGITIMERSSFEKNPIDFLEAKGYKEVKKDLIIKLPKYSLFELENGRKRMLASAGELQKGNELALPSKYVNFLYLASHYEKLKGSPEDNEQKQLFVEQHKHYLDEIIEQISEFSKRVILADANLDKVLSAYNKHRDKPIREQAENIIHLFTLTNLGAPAAFKYFDTTIDRKRYTSTKEVLDATLIHQSITGLYETRIDLSQLGGDGGSGGSGGSGGSGGSGGSGGMDKKYSIGLAIGTNSVGWAVITDEYKVPSKKFKVLGNTDRHSIKKNLIGALLFDSGETAEATRLKRTARRRYTRRKNRICYLQEIFSNEMAKVDDSFFHRLEESFLVEEDKKHERHPIFGNIVDEVAYHEKYPTIYHLRKKLVDSTDKADLRLIYLALAHMIKFRGHFLIEGDLNPDNSDVDKLFIQLVQTYNQLFEENPINASGVDAKAILSARLSKSRRLENLIAQLPGEKKNGLFGNLIALSLGLTPNFKSNFDLAEDAKLQLSKDTYDDDLDNLLAQIGDQYADLFLAAKNLSDAILLSDILRVNTEITKAPLSASMIKRYDEHHQDLTLLKALVRQQLPEKYKEIFFDQSKNGYAGYIDGGASQEEFYKFIKPILEKMDGTEELLVKLNREDLLRKQRTFDNGSIPHQIHLGELHAILRRQEDFYPFLKDNREKIEKILTFRIPYYVGPLARGNSRFAWMTRKSEETITPWNFEEVVDKGASAQSFIERMTNFDKNLPNEKVLPKHSLLYEYFTVYNELTKVKYVTEGMRKPAFLSGEQKKAIVDLLFKTNRKVTVKQLKEDYFKKIECFDSVEISGVEDRFNASLGTYHDLLKIIKDKDFLDNEENEDILEDIVLTLTLFEDREMIEERLKTYAHLFDDKVMKQLKRRRYTGWGRLSRKLINGIRDKQSGKTILDFLKSDGFANRNFMQLIHDDSLTFKEDIQKAQVSGQGDSLHEHIANLAGSPAIKKGILQTVKVVDELVKVMGRHKPENIVIEMARENQTTQKGQKNSRERMKRIEEGIKELGSQILKEHPVENTQLQNEKLYLYYLQNGRDMYVDQELDINRLSDYDVDHIVPQSFLKDDSIDNKVLTRSDKNRGKSDNVPSEEVVKKMKNYWRQLLNAKLITQRKFDNLTKAERGGLSELDKAGFIKRQLVETRQITKHVAQILDSRMNTKYDENDKLIREVKVITLKSKLVSDFRKDFQFYKVREINNYHHAHDAYLNAVVGTALIKKYPKLESEFVYGDYKVYDVRKMIAKSEQSGGSGGSGGSTNLSDIIEKETGKQLVIQESILMLPEEVEEVIGNKPESDILVHTAYDESTDENVMLLTSDAPEYKPWALVIQDSNGENKIKMLSGGSGGSGGSTNLSDIIEKETGKQLVIQESILMLPEEVEEVIGNKPESDILVHTAYDESTDENVMLLTSDAPEYKPWALVIQDSNGENKIKMLSGGSKRTADGSEFEPKKKRKV

SEQ ID NO: 3680 - protein, 1874 aa, synthetic construct
MKRTADGSEFESPKKKRKVSSETGPVAVDPTLRRRIEPHEFEVFFDPRELRKETCLLYEINWGGRHSIWRHTSQNTNKHVEVNFIEKFTTERYFCPNTRCSITWFLSYSPCGECSRAITEFLSRYPHVTLFIYIARLYHHADPRNRQGLEDLISSGVTIQIMTEQESGYCWRNFVNYSPSNEAHWPRYPHLWVRLYVLELYCIILGLPPCLNILRRKQPQLTFFTIALQSCHYQRLPPHILWATGLKSGGSSGGSSGSETPGTSESATPESSGGSSGGSEIGKATAKYFFYSNIMNFFKTEITLANGEIRKRPLIETNGETGEIVWDKGRDFATVRKVLSMPQVNIVKKTEVQTGGFSKESILPKRNSDKLIARKKDWDPKKYGGFDSPTVAYSVLVVAKVEKGKSKKLKSVKELLGITIMERSSFEKNPIDFLEAKGYKEVKKDLIIKLPKYSLFELENGRKRMLASAGELQKGNELALPSKYVNFLYLASHYEKLKGSPEDNEQKQLFVEQHKHYLDEIIEQISEFSKRVILADANLDKVLSAYNKHRDKPIREQAENIIHLFTLTNLGAPAAFKYFDTTIDRKRYTSTKEVLDATLIHQSITGLYETRIDLSQLGGDGGSGGSGGSGGSGGSGGSGGMDKKYSIGLAIGTNSVGWAVITDEYKVPSKKFKVLGNTDRHSIKKNLIGALLFDSGETAEATRLKRTARRRYTRRKNRICYLQEIFSNEMAKVDDSFFHRLEESFLVEEDKKHERHPIFGNIVDEVAYHEKYPTIYHLRKKLVDSTDKADLRLIYLALAHMIKFRGHFLIEGDLNPDNSDVDKLFIQLVQTYNQLFEENPINASGVDAKAILSARLSKSRRLENLIAQLPGEKKNGLFGNLIALSLGLTPNFKSNFDLAEDAKLQLSKDTYDDDLDNLLAQIGDQYADLFLAAKNLSDAILLSDILRVNTEITKAPLSASMIKRYDEHHQDLTLLKALVRQQLPEKYKEIFFDQSKNGYAGYIDGGASQEEFYKFIKPILEKMDGTEELLVKLNREDLLRKQRTFDNGSIPHQIHLGELHAILRRQEDFYPFLKDNREKIEKILTFRIPYYVGPLARGNSRFAWMTRKSEETITPWNFEEVVDKGASAQSFIERMTNFDKNLPNEKVLPKHSLLYEYFTVYNELTKVKYVTEGMRKPAFLSGEQKKAIVDLLFKTNRKVTVKQLKEDYFKKIECFDSVEISGVEDRFNASLGTYHDLLKIIKDKDFLDNEENEDILEDIVLTLTLFEDREMIEERLKTYAHLFDDKVMKQLKRRRYTGWGRLSRKLINGIRDKQSGKTILDFLKSDGFANRNFMQLIHDDSLTFKEDIQKAQVSGQGDSLHEHIANLAGSPAIKKGILQTVKVVDELVKVMGRHKPENIVIEMARENQTTQKGQKNSRERMKRIEEGIKELGSQILKEHPVENTQLQNEKLYLYYLQNGRDMYVDQELDINRLSDYDVDHIVPQSFLKDDSIDNKVLTRSDKNRGKSDNVPSEEVVKKMKNYWRQLLNAKLITQRKFDNLTKAERGGLSELDKAGFIKRQLVETRQITKHVAQILDSRMNTKYDENDKLIREVKVITLKSKLVSDFRKDFQFYKVREINNYHHAHDAYLNAVVGTALIKKYPKLESEFVYGDYKVYDVRKMIAKSEQSGGSGGSGGSTNLSDIIEKETGKQLVIQESILMLPEEVEEVIGNKPESDILVHTAYDESTDENVMLLTSDAPEYKPWALVIQDSNGENKIKMLSGGSGGSGGSTNLSDIIEKETGKQLVIQESILMLPEEVEEVIGNKPESDILVHTAYDESTDENVMLLTSDAPEYKPWALVIQDSNGENKIKMLSGGSKRTADGSEFEPKKKRKV

SEQ ID NO: 3681 - protein, 1874 aa, synthetic construct
MKRTADGSEFESPKKKRKVSSETGPVAVDPTLRRRIEPHEFEVFFDPRELRKETCLLYEINWGGRHSIWRHTSQNTNKHVEVNFIEKFTTERYFCPNTRCSITWFLSYSPCGECSRAITEFLSRYPHVTLFIYIARLYHHADPENRQGLEDLISSGVTIQIMTEQESGYCWRNFVNYSPSNEAHWPRYPHLWVRLYVLELYCIILGLPPCLNILRRKQPQLTFFTIALQSCHYQRLPPHILWATGLKSGGSSGGSSGSETPGTSESATPESSGGSSGGSEIGKATAKYFFYSNIMNFFKTEITLANGEIRKRPLIETNGETGEIVWDKGRDFATVRKVLSMPQVNIVKKTEVQTGGFSKESILPKRNSDKLIARKKDWDPKKYGGFDSPTVAYSVLVVAKVEKGKSKKLKSVKELLGITIMERSSFEKNPIDFLEAKGYKEVKKDLIIKLPKYSLFELENGRKRMLASAGELQKGNELALPSKYVNFLYLASHYEKLKGSPEDNEQKQLFVEQHKHYLDEIIEQISEFSKRVILADANLDKVLSAYNKHRDKPIREQAENIIHLFTLTNLGAPAAFKYFDTTIDRKRYTSTKEVLDATLIHQSITGLYETRIDLSQLGGDGGSGGSGGSGGSGGSGGSGGMDKKYSIGLAIGTNSVGWAVITDEYKVPSKKFKVLGNTDRHSIKKNLIGALLFDSGETAEATRLKRTARRRYTRRKNRICYLQEIFSNEMAKVDDSFFHRLEESFLVEEDKKHERHPIFGNIVDEVAYHEKYPTIYHLRKKLVDSTDKADLRLIYLALAHMIKFRGHFLIEGDLNPDNSDVDKLFIQLVQTYNQLFEENPINASGVDAKAILSARLSKSRRLENLIAQLPGEKKNGLFGNLIALSLGLTPNFKSNFDLAEDAKLQLSKDTYDDDLDNLLAQIGDQYADLFLAAKNLSDAILLSDILRVNTEITKAPLSASMIKRYDEHHQDLTLLKALVRQQLPEKYKEIFFDQSKNGYAGYIDGGASQEEFYKFIKPILEKMDGTEELLVKLNREDLLRKQRTFDNGSIPHQIHLGELHAILRRQEDFYPFLKDNREKIEKILTFRIPYYVGPLARGNSRFAWMTRKSEETITPWNFEEVVDKGASAQSFIERMTNFDKNLPNEKVLPKHSLLYEYFTVYNELTKVKYVTEGMRKPAFLSGEQKKAIVDLLFKTNRKVTVKQLKEDYFKKIECFDSVEISGVEDRFNASLGTYHDLLKIIKDKDFLDNEENEDILEDIVLTLTLFEDREMIEERLKTYAHLFDDKVMKQLKRRRYTGWGRLSRKLINGIRDKQSGKTILDFLKSDGFANRNFMQLIHDDSLTFKEDIQKAQVSGQGDSLHEHIANLAGSPAIKKGILQTVKVVDELVKVMGRHKPENIVIEMARENQTTQKGQKNSRERMKRIEEGIKELGSQILKEHPVENTQLQNEKLYLYYLQNGRDMYVDQELDINRLSDYDVDHIVPQSFLKDDSIDNKVLTRSDKNRGKSDNVPSEEVVKKMKNYWRQLLNAKLITQRKFDNLTKAERGGLSELDKAGFIKRQLVETRQITKHVAQILDSRMNTKYDENDKLIREVKVITLKSKLVSDFRKDFQFYKVREINNYHHAHDAYLNAVVGTALIKKYPKLESEFVYGDYKVYDVRKMIAKSEQSGGSGGSGGSTNLSDIIEKETGKQLVIQESILMLPEEVEEVIGNKPESDILVHTAYDESTDENVMLLTSDAPEYKPWALVIQDSNGENKIKMLSGGSGGSGGSTNLSDIIEKETGKQLVIQESILMLPEEVEEVIGNKPESDILVHTAYDESTDENVMLLTSDAPEYKPWALVIQDSNGENKIKMLSGGSKRTADGSEFEPKKKRKV

SEQ ID NO: 3682 - protein, 1874 aa, synthetic construct
MKRTADGSEFESPKKKRKVSSETGPVAVDPTLRRRIEPHEFEVFFDPRELRKETCLLYEINWGGRHSIWRHTSQNTNKHVEVNFIEKFTTERYFCPNTRCSITWFLSWSPCGECSRAITEFLSRYPHVTLFIYIARLYHHADPENRQGLEDLISSGVTIQIMTEQESGYCWRNFVNYSPSNEAHWPRYPHLWVRLYVLELYCIILGLPPCLNILRRKQPQLTFFTIALQSCHYQRLPPHILWATGLKSGGSSGGSSGSETPGTSESATPESSGGSSGGSEIGKATAKYFFYSNIMNFFKTEITLANGEIRKRPLIETNGETGEIVWDKGRDFATVRKVLSMPQVNIVKKTEVQTGGFSKESILPKRNSDKLIARKKDWDPKKYGGFDSPTVAYSVLVVAKVEKGKSKKLKSVKELLGITIMERSSFEKNPIDFLEAKGYKEVKKDLIIKLPKYSLFELENGRKRMLASAGELQKGNELALPSKYVNFLYLASHYEKLKGSPEDNEQKQLFVEQHKHYLDEIIEQISEFSKRVILADANLDKVLSAYNKHRDKPIREQAENIIHLFTLTNLGAPAAFKYFDTTIDRKRYTSTKEVLDATLIHQSITGLYETRIDLSQLGGDGGSGGSGGSGGSGGSGGSGGMDKKYSIGLAIGTNSVGWAVITDEYKVPSKKFKVLGNTDRHSIKKNLIGALLFDSGETAEATRLKRTARRRYTRRKNRICYLQEIFSNEMAKVDDSFFHRLEESFLVEEDKKHERHPIFGNIVDEVAYHEKYPTIYHLRKKLVDSTDKADLRLIYLALAHMIKFRGHFLIEGDLNPDNSDVDKLFIQLVQTYNQLFEENPINASGVDAKAILSARLSKSRRLENLIAQLPGEKKNGLFGNLIALSLGLTPNFKSNFDLAEDAKLQLSKDTYDDDLDNLLAQIGDQYADLFLAAKNLSDAILLSDILRVNTEITKAPLSASMIKRYDEHHQDLTLLKALVRQQLPEKYKEIFFDQSKNGYAGYIDGGASQEEFYKFIKPILEKMDGTEELLVKLNREDLLRKQRTFDNGSIPHQIHLGELHAILRRQEDFYPFLKDNREKIEKILTFRIPYYVGPLARGNSRFAWMTRKSEETITPWNFEEVVDKGASAQSFIERMTNFDKNLPNEKVLPKHSLLYEYFTVYNELTKVKYVTEGMRKPAFLSGEQKKAIVDLLFKTNRKVTVKQLKEDYFKKIECFDSVEISGVEDRFNASLGTYHDLLKIIKDKDFLDNEENEDILEDIVLTLTLFEDREMIEERLKTYAHLFDDKVMKQLKRRRYTGWGRLSRKLINGIRDKQSGKTILDFLKSDGFANRNFMQLIHDDSLTFKEDIQKAQVSGQGDSLHEHIANLAGSPAIKKGILQTVKVVDELVKVMGRHKPENIVIEMARENQTTQKGQKNSRERMKRIEEGIKELGSQILKEHPVENTQLQNEKLYLYYLQNGRDMYVDQELDINRLSDYDVDHIVPQSFLKDDSIDNKVLTRSDKNRGKSDNVPSEEVVKKMKNYWRQLLNAKLITQRKFDNLTKAERGGLSELDKAGFIKRQLVETRQITKHVAQILDSRMNTKYDENDKLIREVKVITLKSKLVSDFRKDFQFYKVREINNYHHAHDAYLNAVVGTALIKKYPKLESEFVYGDYKVYDVRKMIAKSEQSGGSGGSGGSTNLSDIIEKETGKQLVIQESILMLPEEVEEVIGNKPESDILVHTAYDESTDENVMLLTSDAPEYKPWALVIQDSNGENKIKMLSGGSGGSGGSTNLSDIIEKETGKQLVIQESILMLPEEVEEVIGNKPESDILVHTAYDESTDENVMLLTSDAPEYKPWALVIQDSNGENKIKMLSGGSKRTADGSEFEPKKKRKV

SEQ ID NO: 3683 - protein, 1874 aa, synthetic construct
MKRTADGSEFESPKKKRKVSSETGPVAVDPTLRRRIEPHEFEVFFDPRELAAETCLLYEINWGGRHSIWRHTSQNTNKHVEVNFIEKFTTERYFCPNTRCSITWFLSWSPCGECSRAITEFLSRYPHVTLFIYIARLYHHADPRNRQGLRDLISSGVTIQIMTEQESGYCWRNFVNYSPSNEAHWPRYPHLWVRLYVLELYCIILGLPPCLNILRRKQPQLTFFTIALQSCHYQRLPPHILWATGLKSGGSSGGSSGSETPGTSESATPESSGGSSGGSEIGKATAKYFFYSNIMNFFKTEITLANGEIRKRPLIETNGETGEIVWDKGRDFATVRKVLSMPQVNIVKKTEVQTGGFSKESILPKRNSDKLIARKKDWDPKKYGGFDSPTVAYSVLVVAKVEKGKSKKLKSVKELLGITIMERSSFEKNPIDFLEAKGYKEVKKDLIIKLPKYSLFELENGRKRMLASAGELQKGNELALPSKYVNFLYLASHYEKLKGSPEDNEQKQLFVEQHKHYLDEIIEQISEFSKRVILADANLDKVLSAYNKHRDKPIREQAENIIHLFTLTNLGAPAAFKYFDTTIDRKRYTSTKEVLDATLIHQSITGLYETRIDLSQLGGDGGSGGSGGSGGSGGSGGSGGMDKKYSIGLAIGTNSVGWAVITDEYKVPSKKFKVLGNTDRHSIKKNLIGALLFDSGETAEATRLKRTARRRYTRRKNRICYLQEIFSNEMAKVDDSFFHRLEESFLVEEDKKHERHPIFGNIVDEVAYHEKYPTIYHLRKKLVDSTDKADLRLIYLALAHMIKFRGHFLIEGDLNPDNSDVDKLFIQLVQTYNQLFEENPINASGVDAKAILSARLSKSRRLENLIAQLPGEKKNGLFGNLIALSLGLTPNFKSNFDLAEDAKLQLSKDTYDDDLDNLLAQIGDQYADLFLAAKNLSDAILLSDILRVNTEITKAPLSASMIKRYDEHHQDLTLLKALVRQQLPEKYKEIFFDQSKNGYAGYIDGGASQEEFYKFIKPILEKMDGTEELLVKLNREDLLRKQRTFDNGSIPHQIHLGELHAILRRQEDFYPFLKDNREKIEKILTFRIPYYVGPLARGNSRFAWMTRKSEETITPWNFEEVVDKGASAQSFIERMTNFDKNLPNEKVLPKHSLLYEYFTVYNELTKVKYVTEGMRKPAFLSGEQKKAIVDLLFKTNRKVTVKQLKEDYFKKIECFDSVEISGVEDRFNASLGTYHDLLKIIKDKDFLDNEENEDILEDIVLTLTLFEDREMIEERLKTYAHLFDDKVMKQLKRRRYTGWGRLSRKLINGIRDKQSGKTILDFLKSDGFANRNFMQLIHDDSLTFKEDIQKAQVSGQGDSLHEHIANLAGSPAIKKGILQTVKVVDELVKVMGRHKPENIVIEMARENQTTQKGQKNSRERMKRIEEGIKELGSQILKEHPVENTQLQNEKLYLYYLQNGRDMYVDQELDINRLSDYDVDHIVPQSFLKDDSIDNKVLTRSDKNRGKSDNVPSEEVVKKMKNYWRQLLNAKLITQRKFDNLTKAERGGLSELDKAGFIKRQLVETRQITKHVAQILDSRMNTKYDENDKLIREVKVITLKSKLVSDFRKDFQFYKVREINNYHHAHDAYLNAVVGTALIKKYPKLESEFVYGDYKVYDVRKMIAKSEQSGGSGGSGGSTNLSDIIEKETGKQLVIQESILMLPEEVEEVIGNKPESDILVHTAYDESTDENVMLLTSDAPEYKPWALVIQDSNGENKIKMLSGGSGGSGGSTNLSDIIEKETGKQLVIQESILMLPEEVEEVIGNKPESDILVHTAYDESTDENVMLLTSDAPEYKPWALVIQDSNGENKIKMLSGGSKRTADGSEFEPKKKRKV

SEQ ID NO: 3684 - protein, 229 aa, Rattus sp. [sequence omitted]

SEQ ID NO: 3685 - protein, 236 aa, Homo sapiens; identical to SEQ ID NO: 48

SEQ ID NO: 3686 - protein, 200 aa, Homo sapiens
MSEASPASGPRHLMDPHIFTSNFNNGIGRHKTYLCYEVERLDNGTSVKMDQHRGFLHNQAKNLLCGFYGRHAELRFLDLVPSLQLDPAQIYRVTWFISWSPCFSWGCAGEVRAFLQENTHVRLRIFAARIYDYDPLYKEALQMLRDAGAQVSIMTYDEFKHCWDTFVDHQGCPFQPWDGLDEHSQALSGRLRAILQNQGN

SEQ ID NO: 3687 - protein, 382 aa, Homo sapiens; identical to SEQ ID NO: 37

SEQ ID NO: 3688 - protein, 384 aa, Homo sapiens; identical to SEQ ID NO: 36

SEQ ID NO: 3689 - protein, 199 aa, synthetic construct
MEASPASGPRHLMDPHIFTSNFNNGIGRHKTYLCYEVERLDNGTSVKMDQHRGFLHGQAKNLLCGFYGRHAELRFLDLVPSLQLDPAQIYRVTWFISWSPCFSWGCAGEVRAFLQENTHVRLRIFAARIYDYDPLYKEALQMLRDAGAQVSIMTYDEFKHCWDTFVDHQGCPFQPWDGLDEHSQALSGRLRAILQNQGN

SEQ ID NO: 3690 - protein, 208 aa, synthetic construct
MTDAEYVRIHEKLDIYTFKKQFSNNKKSVSHRCYVLFELKRRGERRACFWGYAVNKPQSGTERGIHAEIFSIRKVEEYLRDNPGQFTINWYSSWSPCADCAEKILEWYNQELRGNGHTLKIWVCKLYYEKNARNQIGLWNLRDNGVGLNVMVSEHYQCCRKIFIQSSHNQLNENRWLEKTLKRAEKRRSELSIMFQVKILHTTKSPAV

SEQ ID NO: 3691 - protein, 229 aa, synthetic construct
MSSKTGPVAVDPTLRRRIEPHEFEVFFDPRELRKETCLLYEINWGGRHSIWRHTSQNTNKHVEVNFIEKFTTERYFCPNTRCSITWFLSWSPCGECSRAITEFLSRYPNVTLFIYIARLYHLANPRNRQGLRDLISSGVTIQIMTEQESGYCWHNFVNYSPSNESHWPRYPHLWVRLYVLELYCIILGLPPCLNILRRKQSQLTSFTIALQSCHYQRLPPHILWATGLK

SEQ ID NO: 3692 - protein, 229 aa, synthetic construct
MSSETGPVAVDPTLRRRIEPHEFEVFFDPRELRKETCLLYEINWGGRHSIWRHTSQNTNKHVEVNFIEKFTTERYFCPNTRCSITWFLSYSPCGECSRAITEFLSRYPHVTLFIYIARLYHHADPENRQGLRDLISSGVTIQIMTEQESGYCWRNFVNYSPSNEAHWPRYPHLWVRLYVLELYCIILGLPPCLNILRRKQPQLTFFTIALQSCHYQRLPPHILWATGLK

SEQ ID NO: 3693 - protein, 229 aa, synthetic construct
MSSETGPVAVDPTLRRRIEPHEFEVFFDPRELRKETCLLYEINWGGRHSIWRHTSQNTNKHVEVNFIEKFTTERYFCPNTRCSITWFLSYSPCGECSRAITEFLSRYPHVTLFIYIARLYHHADPRNRQGLEDLISSGVTIQIMTEQESGYCWRNFVNYSPSNEAHWPRYPHLWVRLYVLELYCIILGLPPCLNILRRKQPQLTFFTIALQSCHYQRLPPHILWATGLK

SEQ ID NO: 3694 - protein, 229 aa, synthetic construct
MSSETGPVAVDPTLRRRIEPHEFEVFFDPRELRKETCLLYEINWGGRHSIWRHTSQNTNKHVEVNFIEKFTTERYFCPNTRCSITWFLSYSPCGECSRAITEFLSRYPHVTLFIYIARLYHHADPENRQGLEDLISSGVTIQIMTEQESGYCWRNFVNYSPSNEAHWPRYPHLWVRLYVLELYCIILGLPPCLNILRRKQPQLTFFTIALQSCHYQRLPPHILWATGLK

SEQ ID NO: 3695 - protein, 229 aa, synthetic construct
MSSETGPVAVDPTLRRRIEPHEFEVFFDPRELRKETCLLYEINWGGRHSIWRHTSQNTNKHVEVNFIEKFTTERYFCPNTRCSITWFLSWSPCGECSRAITEFLSRYPHVTLFIYIARLYHHADPENRQGLEDLISSGVTIQIMTEQESGYCWRNFVNYSPSNEAHWPRYPHLWVRLYVLELYCIILGLPPCLNILRRKQPQLTFFTIALQSCHYQRLPPHILWATGLK

SEQ ID NO: 3696 - protein, 229 aa, synthetic construct
MSSETGPVAVDPTLRRRIEPHEFEVFFDPRELAKETCLLYEINWGGRHSIWRHTSQNTNKHVEVNFIEKFTTERYFCPNTRCSITWFLSWSPCGECSRAITEFLSRYPHVTLFIYIARLYHHADPRNRQGLRDLISSGVTIQIMTEQESGYCWRNFVNYSPSNEAHWPRYPHLWVRLYVLELYCIILGLPPCLNILRRKQPQLTFFTIALQSCHYQRLPPHILWATGLK

SEQ ID NO: 3697 - protein, 229 aa, synthetic construct
MSSETGPVAVDPTLRRRIEPHEFEVFFDPRELAAETCLLYEINWGGRHSIWRHTSQNTNKHVEVNFIEKFTTERYFCPNTRCSITWFLSWSPCGECSRAITEFLSRYPHVTLFIYIARLYHHADPRNRQGLRDLISSGVTIQIMTEQESGYCWRNFVNYSPSNEAHWPRYPHLWVRLYVLELYCIILGLPPCLNILRRKQPQLTFFTIALQSCHYQRLPPHILWATGLK

SEQ ID NO: 3698 - protein, 229 aa, synthetic construct
MSSETGPVAVDPTLRRRIEPHEFEVFFDPRELAAETCLLYEINWGGRHSIWRHTSQNTNKHVEVNFIEKFTTERYFCPNTRCSITWFLSWSPCGECSRAITEFLSRYPHVTLFIYIARLYHLANPRNRQGLRDLISSGVTIQIMTEQESGYCWRNFVNYSPSNEAHWPRYPHLWVRLYVLELYCIILGLPPCLNILRRKQPQLTFFTIALQSCHYQRLPPHILWATGLK

SEQ ID NO: 3699 - protein, 162 aa, synthetic construct
MFERNYDPRELRKETYLLYEIKWGKSGKLWRHWCQNNRTQHAEVYFLENIFNARRFNPSTHCSITWYLSWSPCAECSQKIVDFLKEHPNVNLEIYVARLYYHEDERNRQGLRDLVNSGVTIRIMDLPDYNYCWKTFVSDQGGDEDYWPGHFAPWIKQYSLKL

SEQ ID NO: 3700 - protein, 162 aa, synthetic construct
MFERNYDPRELRKETYLLYEIKWGKSGKLWRHWCQNNRTQHAEVYFLENIFNARRFNPSTHCSITWYLSWSPCAECSQKIVDFLKEHPNVNLEIYVARLYYPENERNRQGLRDLVNSGVTIRIMDLPDYNYCWKTFVSDQGGDEDYWPGHFAPWIKQYSLKL

SEQ ID NO: 3701 - skipped

SEQ ID NO: 3702 - protein, 1853 aa, synthetic construct; identical to SEQ ID NO: 3658

SEQ ID NO: 3703 - protein, 1824 aa, synthetic construct
MSSETGPVAVDPTLRRRIEPHEFEVFFDPRELRKETCLLYEINWGGRHSIWRHTSQNTNKHVEVNFIEKFTTERYFCPNTRCSITWFLSWSPCGECSRAITEFLSRYPHVTLFIYIARLYHHADPRNRQGLRDLISSGVTIQIMTEQESGYCWRNFVNYSPSNEAHWPRYPHLWVRLYVLELYCIILGLPPCLNILRRKQPQLTFFTIALQSCHYQRLPPHILWATGLKSGGSSGGSSGSETPGTSESATPESSGGSSGGSDKKYSIGLAIGTNSVGWAVITDEYKVPSKKFKVLGNTDRHSIKKNLIGALLFDSGETAEATRLKRTARRRYTRRKNRICYLQEIFSNEMAKVDDSFFHRLEESFLVEEDKKHERHPIFGNIVDEVAYHEKYPTIYHLRKKLVDSTDKADLRLIYLALAHMIKFRGHFLIEGDLNPDNSDVDKLFIQLVQTYNQLFEENPINASGVDAKAILSARLSKSRRLENLIAQLPGEKKNGLFGNLIALSLGLTPNFKSNFDLAEDAKLQLSKDTYDDDLDNLLAQIGDQYADLFLAAKNLSDAILLSDILRVNTEITKAPLSASMIKRYDEHHQDLTLLKALVRQQLPEKYKEIFFDQSKNGYAGYIDGGASQEEFYKFIKPILEKMDGTEELLVKLNREDLLRKQRTFDNGSIPHQIHLGELHAILRRQEDFYPFLKDNREKIEKILTFRIPYYVGPLARGNSRFAWMTRKSEETITPWNFEEVVDKGASAQSFIERMTNFDKNLPNEKVLPKHSLLYEYFTVYNELTKVKYVTEGMRKPAFLSGEQKKAIVDLLFKTNRKVTVKQLKEDYFKKIECFDSVEISGVEDRFNASLGTYHDLLKIIKDKDFLDNEENEDILEDIVLTLTLFEDREMIEERLKTYAHLFDDKVMKQLKRRRYTGWGRLSRKLINGIRDKQSGKTILDFLKSDGFANRNFMQLIHDDSLTFKEDIQKAQVSGQGDSLHEHIANLAGSPAIKKGILQTVKVVDELVKVMGRHKPENIVIEMARENQTTQKGQKNSRERMKRIEEGIKELGSQILKEHPVENTQLQNEKLYLYYLQNGRDMYVDQELDINRLSDYDVDHIVPQSFLKDDSIDNKVLTRSDKNRGKSDNVPSEEVVKKMKNYWRQLLNAKLITQRKFDNLTKAERGGLSELDKAGFIKRQLVETRQITKHVAQILDSRMNTKYDENDKLIREVKVITLKSKLVSDFRKDFQFYKVREINNYHHAHDAYLNAVVGTALIKKYPKLESEFVYGDYKVYDVRKMIAKSEQEIGKATAKYFFYSNIMNFFKTEITLANGEIRKRPLIETNGETGEIVWDKGRDFATVRKVLSMPQVNIVKKTEVQTGGFSKESILPKRNSDKLIARKKDWDPKKYGGFDSPTVAYSVLVVAKVEKGKSKKLKSVKELLGITIMERSSFEKNPIDFLEAKGYKEVKKDLIIKLPKYSLFELENGRKRMLASAGELQKGNELALPSKYVNFLYLASHYEKLKGSPEDNEQKQLFVEQHKHYLDEIIEQISEFSKRVILADANLDKVLSAYNKHRDKPIREQAENIIHLFTLTNLGAPAAFKYFDTTIDRKRYTSTKEVLDATLIHQSITGLYETRIDLSQLGGDSGGSGGSGGSTNLSDIIEKETGKQLVIQESILMLPEEVEEVIGNKPESDILVHTAYDESTDENVMLLTSDAPEYKPWALVIQDSNGENKIKMLSGGSGGSGGSTNLSDIIEKETGKQLVIQESILMLPEEVEEVIGNKPESDILVHTAYDESTDENVMLLTSDAPEYKPWALVIQDSNGENKIKMLSGGSPKKKRK

SEQ ID NO: 3704 - protein, 1838 aa, synthetic construct
MHHHHHHHHGSGGSGSSETGPVAVDPTLRRRIEPHEFEVFFDPRELRKETCLLYEINWGGRHSIWRHTSQNTNKHVEVNFIEKFTTERYFCPNTRCSITWFLSWSPCGECSRAITEFLSRYPHVTLFIYIARLYHHADPRNRQGLRDLISSGVTIQIMTEQESGYCWRNFVNYSPSNEAHWPRYPHLWVRLYVLELYCIILGLPPCLNILRRKQPQLTFFTIALQSCHYQRLPPHILWATGLKSGGSSGGSSGSETPGTSESATPESSGGSSGGSDKKYSIGLAIGTNSVGWAVITDEYKVPSKKFKVLGNTDRHSIKKNLIGALLFDSGETAEATRLKRTARRRYTRRKNRICYLQEIFSNEMAKVDDSFFHRLEESFLVEEDKKHERHPIFGNIVDEVAYHEKYPTIYHLRKKLVDSTDKADLRLIYLALAHMIKFRGHFLIEGDLNPDNSDVDKLFIQLVQTYNQLFEENPINASGVDAKAILSARLSKSRRLENLIAQLPGEKKNGLFGNLIALSLGLTPNFKSNFDLAEDAKLQLSKDTYDDDLDNLLAQIGDQYADLFLAAKNLSDAILLSDILRVNTEITKAPLSASMIKRYDEHHQDLTLLKALVRQQLPEKYKEIFFDQSKNGYAGYIDGGASQEEFYKFIKPILEKMDGTEELLVKLNREDLLRKQRTFDNGSIPHQIHLGELHAILRRQEDFYPFLKDNREKIEKILTFRIPYYVGPLARGNSRFAWMTRKSEETITPWNFEEVVDKGASAQSFIERMTNFDKNLPNEKVLPKHSLLYEYFTVYNELTKVKYVTEGMRKPAFLSGEQKKAIVDLLFKTNRKVTVKQLKEDYFKKIECFDSVEISGVEDRFNASLGTYHDLLKIIKDKDFLDNEENEDILEDIVLTLTLFEDREMIEERLKTYAHLFDDKVMKQLKRRRYTGWGRLSRKLINGIRDKQSGKTILDFLKSDGFANRNFMQLIHDDSLTFKEDIQKAQVSGQGDSLHEHIANLAGSPAIKKGILQTVKVVDELVKVMGRHKPENIVIEMARENQTTQKGQKNSRERMKRIEEGIKELGSQILKEHPVENTQLQNEKLYLYYLQNGRDMYVDQELDINRLSDYDVDHIVPQSFLKDDSIDNKVLTRSDKNRGKSDNVPSEEVVKKMKNYWRQLLNAKLITQRKFDNLTKAERGGLSELDKAGFIKRQLVETRQITKHVAQILDSRMNTKYDENDKLIREVKVITLKSKLVSDFRKDFQFYKVREINNYHHAHDAYLNAVVGTALIKKYPKLESEFVYGDYKVYDVRKMIAKSEQEIGKATAKYFFYSNIMNFFKTEITLANGEIRKRPLIETNGETGEIVWDKGRDFATVRKVLSMPQVNIVKKTEVQTGGFSKESILPKRNSDKLIARKKDWDPKKYGGFDSPTVAYSVLVVAKVEKGKSKKLKSVKELLGITIMERSSFEKNPIDFLEAKGYKEVKKDLIIKLPKYSLFELENGRKRMLASAGELQKGNELALPSKYVNFLYLASHYEKLKGSPEDNEQKQLFVEQHKHYLDEIIEQISEFSKRVILADANLDKVLSAYNKHRDKPIREQAENIIHLFTLTNLGAPAAFKYFDTTIDRKRYTSTKEVLDATLIHQSITGLYETRIDLSQLGGDSGGSGGSGGSTNLSDIIEKETGKQLVIQESILMLPEEVEEVIGNKPESDILVHTAYDESTDENVMLLTSDAPEYKPWALVIQDSNGENKIKMLSGGSGGSGGSTNLSDIIEKETGKQLVIQESILMLPEEVEEVIGNKPESDILVHTAYDESTDENVMLLTSDAPEYKPWALVIQDSNGENKIKMLSGGSPKKKRK

SEQ ID NO: 3705 - protein, 1853 aa, synthetic construct; identical to SEQ ID NO: 3658

SEQ ID NO: 3706 - protein, 1853 aa, synthetic construct
MKRTADGSEFESPKKKRKVSSETGPVAVDPTLRRRIEPHEFEVFFDPRELRKETCLLYEIKWGTSHKIWRHSSKNTTKHVEVNFIEKFTSERHFCPSTSCSITWFLSWSPCGECSKAITEFLSQHPNVTLVIYVARLYHHMDQQNRQGLRDLVNSGVTIQIMTAPEYDYCWRNFVNYPPGKEAHWPRYPPLWMKLYALELHAGILGLPPCLNILRRKQPQLTFFTIALQSCHYQRLPPHILWATGLKSGGSSGGSSGSETPGTSESATPESSGGSSGGSDKKYSIGLAIGTNSVGWAVITDEYKVPSKKFKVLGNTDRHSIKKNLIGALLFDSGETAEATRLKRTARRRYTRRKNRICYLQEIFSNEMAKVDDSFFHRLEESFLVEEDKKHERHPIFGNIVDEVAYHEKYPTIYHLRKKLVDSTDKADLRLIYLALAHMIKFRGHFLIEGDLNPDNSDVDKLFIQLVQTYNQLFEENPINASGVDAKAILSARLSKSRRLENLIAQLPGEKKNGLFGNLIALSLGLTPNFKSNFDLAEDAKLQLSKDTYDDDLDNLLAQIGDQYADLFLAAKNLSDAILLSDILRVNTEITKAPLSASMIKRYDEHHQDLTLLKALVRQQLPEKYKEIFFDQSKNGYAGYIDGGASQEEFYKFIKPILEKMDGTEELLVKLNREDLLRKQRTFDNGSIPHQIHLGELHAILRRQEDFYPFLKDNREKIEKILTFRIPYYVGPLARGNSRFAWMTRKSEETITPWNFEEVVDKGASAQSFIERMTNFDKNLPNEKVLPKHSLLYEYFTVYNELTKVKYVTEGMRKPAFLSGEQKKAIVDLLFKTNRKVTVKQLKEDYFKKIECFDSVEISGVEDRFNASLGTYHDLLKIIKDKDFLDNEENEDILEDIVLTLTLFEDREMIEERLKTYAHLFDDKVMKQLKRRRYTGWGRLSRKLINGIRDKQSGKTILDFLKSDGFANRNFMQLIHDDSLTFKEDIQKAQVSGQGDSLHEHIANLAGSPAIKKGILQTVKVVDELVKVMGRHKPENIVIEMARENQTTQKGQKNSRERMKRIEEGIKELGSQILKEHPVENTQLQNEKLYLYYLQNGRDMYVDQELDINRLSDYDVDHIVPQSFLKDDSIDNKVLTRSDKNRGKSDNVPSEEVVKKMKNYWRQLLNAKLITQRKFDNLTKAERGGLSELDKAGFIKRQLVETRQITKHVAQILDSRMNTKYDENDKLIREVKVITLKSKLVSDFRKDFQFYKVREINNYHHAHDAYLNAVVGTALIKKYPKLESEFVYGDYKVYDVRKMIAKSEQEIGKATAKYFFYSNIMNFFKTEITLANGEIRKRPLIETNGETGEIVWDKGRDFATVRKVLSMPQVNIVKKTEVQTGGFSKESILPKRNSDKLIARKKDWDPKKYGGFDSPTVAYSVLVVAKVEKGKSKKLKSVKELLGITIMERSSFEKNPIDFLEAKGYKEVKKDLIIKLPKYSLFELENGRKRMLASAGELQKGNELALPSKYVNFLYLASHYEKLKGSPEDNEQKQLFVEQHKHYLDEIIEQISEFSKRVILADANLDKVLSAYNKHRDKPIREQAENIIHLFTLTNLGAPAAFKYFDTTIDRKRYTSTKEVLDATLIHQSITGLYETRIDLSQLGGDSGGSGGSGGSTNLSDIIEKETGKQLVIQESILMLPEEVEEVIGNKPESDILVHTAYDESTDENVMLLTSDAPEYKPWALVIQDSNGENKIKMLSGGSGGSGGSTNLSDIIEKETGKQLVIQESILMLPEEVEEVIGNKPESDILVHTAYDESTDENVMLLTSDAPEYKPWALVIQDSNGENKIKMLSGGSKRTADGSEFEPKKKRKV

SEQ ID NO: 3707 - protein, 1853 aa, synthetic construct
MKRTADGSEFESPKKKRKVSSETGPVAVDPTLRRRIEPHEFEVFFDPRELRKEACLLYEIKWGTSHKIWRNSGKNTTKHVEVNFIEKFTSERHFCPSISCSITWFLSWSPCWECSKAIREFLSQHPNVTLVIYVARLFQHMDQQNRQGLRDLVNSGVTIQIMTASEYDHCWRNFVNYPPGKEAHWPRYPPLWMKLYALELHAGILGLPPCLNILRRKQPQLTFFTIALQSCHYQRLPPHILWATGLKSGGSSGGSSGSETPGTSESATPESSGGSSGGSDKKYSIGLAIGTNSVGWAVITDEYKVPSKKFKVLGNTDRHSIKKNLIGALLFDSGETAEATRLKRTARRRYTRRKNRICYLQEIFSNEMAKVDDSFFHRLEESFLVEEDKKHERHPIFGNIVDEVAYHEKYPTIYHLRKKLVDSTDKADLRLIYLALAHMIKFRGHFLIEGDLNPDNSDVDKLFIQLVQTYNQLFEENPINASGVDAKAILSARLSKSRRLENLIAQLPGEKKNGLFGNLIALSLGLTPNFKSNFDLAEDAKLQLSKDTYDDDLDNLLAQIGDQYADLFLAAKNLSDAILLSDILRVNTEITKAPLSASMIKRYDEHHQDLTLLKALVRQQLPEKYKEIFFDQSKNGYAGYIDGGASQEEFYKFIKPILEKMDGTEELLVKLNREDLLRKQRTFDNGSIPHQIHLGELHAILRRQEDFYPFLKDNREKIEKILTFRIPYYVGPLARGNSRFAWMTRKSEETITPWNFEEVVDKGASAQSFIERMTNFDKNLPNEKVLPKHSLLYEYFTVYNELTKVKYVTEGMRKPAFLSGEQKKAIVDLLFKTNRKVTVKQLKEDYFKKIECFDSVEISGVEDRFNASLGTYHDLLKIIKDKDFLDNEENEDILEDIVLTLTLFEDREMIEERLKTYAHLFDDKVMKQLKRRRYTGWGRLSRKLINGIRDKQSGKTILDFLKSDGFANRNFMQLIHDDSLTFKEDIQKAQVSGQGDSLHEHIANLAGSPAIKKGILQTVKVVDELVKVMGRHKPENIVIEMARENQTTQKGQKNSRERMKRIEEGIKELGSQILKEHPVENTQLQNEKLYLYYLQNGRDMYVDQELDINRLSDYDVDHIVPQSFLKDDSIDNKVLTRSDKNRGKSDNVPSEEVVKKMKNYWRQLLNAKLITQRKFDNLTKAERGGLSELDKAGFIKRQLVETRQITKHVAQILDSRMNTKYDENDKLIREVKVITLKSKLVSDFRKDFQFYKVREINNYHHAHDAYLNAVVGTALIKKYPKLESEFVYGDYKVYDVRKMIAKSEQEIGKATAKYFFYSNIMNFFKTEITLANGEIRKRPLIETNGETGEIVWDKGRDFATVRKVLSMPQVNIVKKTEVQTGGFSKESILPKRNSDKLIARKKDWDPKKYGGFDSPTVAYSVLVVAKVEKGKSKKLKSVKELLGITIMERSSFEKNPIDFLEAKGYKEVKKDLIIKLPKYSLFELENGRKRMLASAGELQKGNELALPSKYVNFLYLASHYEKLKGSPEDNEQKQLFVEQHKHYLDEIIEQISEFSKRVILADANLDKVLSAYNKHRDKPIREQAENIIHLFTLTNLGAPAAFKYFDTTIDRKRYTSTKEVLDATLIHQSITGLYETRIDLSQLGGDSGGSGGSGGSTNLSDIIEKETGKQLVIQESILMLPEEVEEVIGNKPESDILVHTAYDESTDENVMLLTSDAPEYKPWALVIQDSNGENKIKMLSGGSGGSGGSTNLSDIIEKETGKQLVIQESILMLPEEVEEVIGNKPESDILVHTAYDESTDENVMLLTSDAPEYKPWALVIQDSNGENKIKMLSGGSKRTADGSEFEPKKKRKV

SEQ ID NO: 3708 - skipped

SEQ ID NO: 3709 - DNA, 684 bp, Rattus sp.
  source 1..684: mol_type = other DNA
tcctcagagactgggcctgtcgccgtcgatccaaccctgcgccgccggattgaacctcacgagtttgaagtgttctttgacccccgggagctgagaaaggagacatgcctgctgtacgagatcaactggggaggcaggcactccatctggaggcacacctctcagaacacaaataagcacgtggaggtgaacttcatcgagaagtttaccacagagcggtacttctgccccaataccagatgtagcatcacatggtttctgagctggtccccttgcggagagtgtagcagggccatcaccgagttcctgtccagatatccacacgtgacactgtttatctacatcgccaggctgtatcaccacgcagacccaaggaataggcagggcctgcgcgatctgatcagctccggcgtgaccatccagatcatgacagagcaggagtccggctactgctggcggaacttcgtgaattattctcctagcaacgaggcccactggcctaggtacccacacctgtgggtgcgcctgtacgtgctggagctgtattgcatcatcctgggcctgcccccttgtctgaatatcctgcggagaaagcagccccagctgaccttctttacaatcgccctgcagtcttgtcactatcagaggctgccaccccacatcctgtgggccacaggcctgaag

SEQ ID NO: 3710 - DNA, 686 bp, synthetic construct
  source 1..686: mol_type = other DNA
agcagtgaaaccggaccagtggcagtggacccaaccctgaggagacggattgagccccatgaatttgaagtgttctttgacccaagggagctgaggaaggagacatgcctgctgtacgagatcaagtggggcacaagccacaagatctggcgccacagctccaagaacaccacaaagcacgtggaagtgaatttcatcgagaagtttacctccgagcggcacttctgcccctctaccagctgttccatcacatggtttctgtcttggagcccttgcggcgagtgttccaaggccatcaccgagttcctgtctcagcaccctaacgtgaccctggtcatctacgtggcccggctgtatcaccacatggaccagcagaacaggcagggcctgcgcgatctggtgaattctggcgtgaccatccagatcatgacagccccagagtacgactattgctggcggaacttcgtgaattatccacctggcaaggaggcacactggccaagatacccacccctgtggatgaagctgtatgcactggagctgcacgcaggaatcctgggcctgcctccatgtctgaatatcctgcggagaaagcagccccagctgacatttttcaccattgctctgcagtcttgtcactatcagcggctgcctcctcatattctgtgggctacaggcctttgaaa

SEQ ID NO: 3711 - DNA, 686 bp, synthetic construct
  source 1..686: mol_type = other DNA
tcatcagaaacaggaccagtcgccgtggacccaacactgaggagaaggattgagccccatgaatttgaagtctttttcgaccccagggagctgaggaaggaggcatgcctgctgtacgagatcaagtggggcacaagccacaagatctggcgcaacagcggcaagaacaccacaaagcacgtggaagtgaatttcatcgagaagtttacctccgagcggcacttctgcccctctatcagctgttccatcacatggtttctgtcttggagcccttgctgggagtgttccaaggccatccgcgagttcctgtctcagcaccctaacgtgaccctggtcatctacgtggcccggctgtttcaacacatggaccagcagaacaggcagggcctgcgcgatctggtgaattctggcgtgaccatccagatcatgacagcctcagagtacgaccattgctggcggaacttcgtgaattatccacctggcaaggaggcacactggccaagatacccacccctgtggatgaagctgtatgcactggagctgcacgcaggaatcctgggcctgcctccatgtctgaatatcctgcggagaaagcagccccagctgacatttttcactatcgcactgcagagctgtcattaccagagactgcctcctcatatcctgtgggctacaggcctttgaaa

SEQ ID NO: 3712 - DNA, 686 bp, synthetic construct
  source 1..686: mol_type = other DNA
agcagcgagacaggacccgtggcagtggaccctacactgaggaggaggattgagcccgaatttttcaacaggaactacgaccccagagagctgcggaaggagacatacctgctgtatgagatcaagtggggcaaggagtccaagatctggcggcacacctctaacaatagaacacagcacgccgaggtgaacttcctggagaacttctttaatgagctgtactttaatccttctacccactgcagcatcacatggttcctgagctggtccccatgcggcgagtgttctaaggccatcgtggagtttctgaaggagcaccccaacgtgaatctggagatctacgtggccaggctgtatctgtgcgaggacgagaggaacaggcagggcctgcgggatctggtgaatagcggcgtgaccatcagaatcatgaacctgcctgactacaattattgttggcgcacattcgtgtcccaccagggaggcgacgaggattattggccaaggcactttgcaccatgggtgcgcctgtacgtgctggagctgtattgcatcatcctgggcctgcccccttgtctgaacatcctgcggagaaagcagccccagctgacattcttcaccatcgcactgcagagttgtcattaccagcgactgcctcctcatatcctgtgggctacaggcctttgaaa

SEQ ID NO: 3713 - DNA, 686 bp, synthetic construct
  source 1..686: mol_type = other DNA
tcatcagagaccggacctgtggcagtggacccaaccctgcgacggagaatcgagcccttttactttcagttcaacaacgacccaagagcctgccggagaaagacctacctgtgctatgagctgaagcaggacggctctacctgggtgtggaagcggacactgcacaacaagggcagacacgccgagatctgcttcctggagaagatcagctccctggagaagctggaccctgcccagcactacaggatcacatggtatatgtcttggagcccatgctccaactgtgcccagaagatcgtggattttctgaaggagcacccacacgtgaatctgcggatctacgtggccagactgtactatcacgaggaggagaggtatcaggagggcctgaggaacctgaggcgctccggcgtgtctatcagagtgatggacctgcccgatttcgagcactgctgggagacattcgtggataacggaggaggacctttccagccatggcccggcctggaggagctgaatagcaagcagctgtcccggagactgcaggcaggaatcctgggcctgcccccttgtctgaatatcctgaggcgcaagcagccccagctgacatttttcaccatcgcactgcagagttgtcattatcagcgactgcctcctcatatcctgtgggctacaggcctttgaaa

SEQ ID NO: 3714 - DNA, 686 bp, synthetic construct
  source 1..686: mol_type = other DNA
agcagcgagaccggacctgtggcagtggacccaaccctgagaagacgcattgagccatttcattttcagtttaacaacgaccccagagcctaccggagaaagacctacctgtgctatgagctgaagcaggacggctccacctgggtgctggatcggacactgagaaacaagggccggcacgccgagatctgtttcctggacaagatcaattcctgggagaggctggatcccgcccagcactaccgcgtgacatggtatatgagctggtccccttgctctaactgtgcccagcaggtggtggatttcctgaaggagcacccacacgtgaatctgcggatctttgccgccagactgtactatcacgagcagaggcgctatcaggagggcctgcggagcctgaggggaagcggagtgcctgtggccgtgatgaccctgccagacttcgagcactgctgggagacatttgtggatcacggcggccggccattccagccatgggacggcctggaggagctgaactctaggagcctgtcccggagactgcaggcaggaatcctgggcctgcccccttgtctgaatatcctgaggcgcaagcagccccagctgaccttttttaccatcgcactgcagagttgtcactaccagagactgcctcctcatatcctgtgggctacaggcctttgaaa

SEQ ID NO: 3715 - DNA, 1368 bp, Rattus sp.
  source 1..1368: mol_type = other DNA
tcctcagagactgggcctgtcgccgtcgatccaaccctgcgccgccggattgaacctcacgagtttgaagtgttctttgacccccgggagctgagaaaggagacatgcctgctgtacgagatcaactggggaggcaggcactccatctggaggcacacctctcagaacacaaataagcacgtggaggtgaacttcatcgagaagtttaccacagagcggtacttctgccccaataccagatgtagcatcacatggtttctgagctggtccccttgcggagagtgtagcagggccatcaccgagttcctgtccagatatccacacgtgacactgtttatctacatcgccaggctgtatcaccacgcagacccaaggaataggcagggcctgcgcgatctgatcagctccggcgtgaccatccagatcatgacagagcaggagtccggctactgctggcggaacttcgtgaattattctcctagcaacgaggcccactggcctaggtacccacacctgtgggtgcgcctgtacgtgctggagctgtattgcatcatcctgggcctgcccccttgtctgaatatcctgcggagaaagcagccccagctgaccttctttacaatcgccctgcagtcttgtcactatcagaggctgccaccccacatcctgtgggccacaggcctgaagtcctcagagactgggcctgtcgccgtcgatccaaccctgcgccgccggattgaacctcacgagtttgaagtgttctttgacccccgggagctgagaaaggagacatgcctgctgtacgagatcaactggggaggcaggcactccatctggaggcacacctctcagaacacaaataagcacgtggaggtgaacttcatcgagaagtttaccacagagcggtacttctgccccaataccagatgtagcatcacatggtttctgagctggtccccttgcggagagtgtagcagggccatcaccgagttcctgtccagatatccacacgtgacactgtttatctacatcgccaggctgtatcaccacgcagacccaaggaataggcagggcctgcgcgatctgatcagctccggcgtgaccatccagatcatgacagagcaggagtccggctactgctggcggaacttcgtgaattattctcctagcaacgaggcccactggcctaggtacccacacctgtgggtgcgcctgtacgtgctggagctgtattgcatcatcctgggcctgcccccttgtctgaatatcctgcggagaaagcagccccagctgaccttctttacaatcgccctgcagtcttgtcactatcagaggctgccaccccacatcctgtgggccacaggcctgaag

SEQ ID NO: 3716 - DNA, 684 bp, synthetic construct
  source 1..684: mol_type = other DNA
agcagtgaaaccggaccagtggcagtggacccaaccctgaggagacggattgagccccatgaatttgaagtgttctttgacccaagggagctgaggaaggagacatgcctgctgtacgagatcaagtggggcacaagccacaagatctggcgccacagctccaagaacaccacaaagcacgtggaagtgaatttcatcgagaagtttacctccgagcggcacttctgcccctctaccagctgttccatcacatggtttctgtcttggagcccttgcggcgagtgttccaaggccatcaccgagttcctgtctcagcaccctaacgtgaccctggtcatctacgtggcccggctgtatcaccacatggaccagcagaacaggcagggcctgcgcgatctggtgaattctggcgtgaccatccagatcatgacagccccagagtacgactattgctggcggaacttcgtgaattatccacctggcaaggaggcacactggccaagatacccacccctgtggatgaagctgtatgcactggagctgcacgcaggaatcctgggcctgcctccatgtctgaatatcctgcggagaaagcagccccagctgacatttttcaccattgctctgcagtcttgtcactatcagcggctgcctcctcatattctgtgggctacaggccttaaa

SEQ ID NO: 3717 - DNA, 684 bp, synthetic construct
  source 1..684: mol_type = other DNA
tcatcagaaacaggaccagtcgccgtggacccaacactgaggagaaggattgagccccatgaatttgaagtctttttcgaccccagggagctgaggaaggaggcatgcctgctgtacgagatcaagtggggcacaagccacaagatctggcgcaacagcggcaagaacaccacaaagcacgtggaagtgaatttcatcgagaagtttacctccgagcggcacttctgcccctctatcagctgttccatcacatggtttctgtcttggagcccttgctgggagtgttccaaggccatccgcgagttcctgtctcagcaccctaacgtgaccctggtcatctacgtggcccggctgtttcaacacatggaccagcagaacaggcagggcctgcgcgatctggtgaattctggcgtgaccatccagatcatgacagcctcagagtacgaccattgctggcggaacttcgtgaattatccacctggcaaggaggcacactggccaagatacccacccctgtggatgaagctgtatgcactggagctgcacgcaggaatcctgggcctgcctccatgtctgaatatcctgcggagaaagcagccccagctgacatttttcactatcgcactgcagagctgtcattaccagagactgcctcctcatatcctgtgggctacaggccttaaa

SEQ ID NO: 3718 - DNA, 684 bp, synthetic construct
  source 1..684: mol_type = other DNA
agcagcgagacaggacccgtggcagtggaccctacactgaggaggaggattgagcccgaatttttcaacaggaactacgaccccagagagctgcggaaggagacatacctgctgtatgagatcaagtggggcaaggagtccaagatctggcggcacacctctaacaatagaacacagcacgccgaggtgaacttcctggagaacttctttaatgagctgtactttaatccttctacccactgcagcatcacatggttcctgagctggtccccatgcggcgagtgttctaaggccatcgtggagtttctgaaggagcaccccaacgtgaatctggagatctacgtggccaggctgtatctgtgcgaggacgagaggaacaggcagggcctgcgggatctggtgaatagcggcgtgaccatcagaatcatgaacctgcctgactacaattattgttggcgcacattcgtgtcccaccagggaggcgacgaggattattggccaaggcactttgcaccatgggtgcgcctgtacgtgctggagctgtattgcatcatcctgggcctgcccccttgtctgaacatcctgcggagaaagcagccccagctgacattcttcaccatcgcactgcagagttgtcattaccagcgactgcctcctcatatcctgtgggctacaggccttaaa

SEQ ID NO: 3719 - DNA, 684 bp, synthetic construct
  source 1..684: mol_type = other DNA
tcatcagagaccggacctgtggcagtggacccaaccctgcgacggagaatcgagcccttttactttcagttcaacaacgacccaagagcctgccggagaaagacctacctgtgctatgagctgaagcaggacggctctacctgggtgtggaagcggacactgcacaacaagggcagacacgccgagatctgcttcctggagaagatcagctccctggagaagctggaccctgcccagcactacaggatcacatggtatatgtcttggagcccatgctccaactgtgcccagaagatcgtggattttctgaaggagcacccacacgtgaatctgcggatctacgtggccagactgtactatcacgaggaggagaggtatcaggagggcctgaggaacctgaggcgctccggcgtgtctatcagagtgatggacctgcccgatttcgagcactgctgggagacattcgtggataacggaggaggacctttccagccatggcccggcctggaggagctgaatagcaagcagctgtcccggagactgcaggcaggaatcctgggcctgcccccttgtctgaatatcctgaggcgcaagcagccccagctgacatttttcaccatcgcactgcagagttgtcattatcagcgactgcctcctcatatcctgtgggctacaggccttaaa

SEQ ID NO: 3720 - DNA, 684 bp, synthetic construct
  source 1..684: mol_type = other DNA
agcagcgagaccggacctgtggcagtggacccaaccctgagaagacgcattgagccatttcattttcagtttaacaacgaccccagagcctaccggagaaagacctacctgtgctatgagctgaagcaggacggctccacctgggtgctggatcggacactgagaaacaagggccggcacgccgagatctgtttcctggacaagatcaattcctgggagaggctggatcccgcccagcactaccgcgtgacatggtatatgagctggtccccttgctctaactgtgcccagcaggtggtggatttcctgaaggagcacccacacgtgaatctgcggatctttgccgccagactgtactatcacgagcagaggcgctatcaggagggcctgcggagcctgaggggaagcggagtgcctgtggccgtgatgaccctgccagacttcgagcactgctgggagacatttgtggatcacggcggccggccattccagccatgggacggcctggaggagctgaactctaggagcctgtcccggagactgcaggcaggaatcctgggcctgcccccttgtctgaatatcctgaggcgcaagcagccccagctgaccttttttaccatcgcactgcagagttgtcactaccagagactgcctcctcatatcctgtgggctacaggccttaaa

SEQ ID NO: 3721 - DNA, 5559 bp, synthetic construct
  source 1..5559: mol_type = other DNA
atgaaacggacagccgacggaagcgagttcgagtcaccaaagaagaagcggaaagtctcctcagagactgggcctgtcgccgtcgatccaaccctgcgccgccggattgaacctcacgagtttgaagtgttctttgacccccgggagctgagaaaggagacatgcctgctgtacgagatcaactggggaggcaggcactccatctggaggcacacctctcagaacacaaataagcacgtggaggtgaacttcatcgagaagtttaccacagagcggtacttctgccccaataccagatgtagcatcacatggtttctgagctggtccccttgcggagagtgtagcagggccatcaccgagttcctgtccagatatccacacgtgacactgtttatctacatcgccaggctgtatcaccacgcagacccaaggaataggcagggcctgcgcgatctgatcagctccggcgtgaccatccagatcatgacagagcaggagtccggctactgctggcggaacttcgtgaattattctcctagcaacgaggcccactggcctaggtacccacacctgtgggtgcgcctgtacgtgctggagctgtattgcatcatcctgggcctgcccccttgtctgaatatcctgcggagaaagcagccccagctgaccttctttacaatcgccctgcagtcttgtcactatcagaggctgccaccccacatcctgtgggccacaggcctgaagtctggaggatctagcggaggatcctctggcagcgagacaccaggaacaagcgagtcagcaacaccagagagcagtggcggcagcagcggcggcagcgacaagaagtacagcatcggcctggacatcggcaccaactctgtgggctgggccgtgatcaccgacgagtacaaggtgcccagcaagaaattcaaggtgctgggcaacaccgaccggcacagcatcaagaagaacctgatcggagccctgctgttcgacagcggcgaaacagccgaggccacccggctgaagagaaccgccagaagaagatacaccagacggaagaaccggatctgctatctgcaagagatcttcagcaacgagatggccaaggtggacgacagcttcttccacagactggaagagtccttcctggtggaagaggataagaagcacgagcggcaccccatcttcggcaacatcgtggacgaggtggcctaccacgagaagtaccccaccatctaccacctgagaaagaaactggtggacagcaccgacaaggccgacctgcggctgatctatctggccctggcccacatgatcaagttccggggccacttcctgatcgagggcgacctgaaccccgacaacagcgacgtggacaagctgttcatccagctggtgcagacctacaaccagctgttcgaggaaaaccccatcaacgccagcggcgtggacgccaaggccatcctgtctgccagactgagcaagagcagacggctggaaaatctgatcgcccagctgcccggcgagaagaagaatggcctgttcggaaacctgattgccctgagcctgggcctgacccccaacttcaagagcaacttcgacctggccgaggatgccaaactgcagctgagcaaggacacctacgacgacgacctggacaacctgctggcccagatcggcgaccagtacgccgacctgtttctggccgccaagaacctgtccgacgccatcctgctgagcgacatcctgagagtgaacaccgagatcaccaaggcccccctgagcgcctctatgatcaagagatacgacgagcaccaccaggacctgaccctgctgaaagctctcgtgcggcagcagctgcctgagaagtacaaagagattttcttcgaccagagcaagaacggctacgccggctacattgacggcggagccagccaggaagagttctacaagttcatcaagcccatcctggaaaagatggacggcaccgaggaactgctcgtgaagctgaacagagaggacctgctgcggaagcagcggaccttcgacaacggcagcatcccccaccagatccacctgggagagctgcacgccattctgcggcggcaggaagatttttacccattcctgaaggacaaccgggaaaagatcgagaagatcctgaccttccgcatcccctactacgtgggccctctggccaggggaaacagcagattcgcctggatgaccagaaagagcgaggaaaccatcaccccctggaacttcgaggaagtggtggacaagggcgcttccgcccagagcttcatcgagcggatgaccaacttcgataagaacctgcccaacgagaaggtgctgcccaagcacagcctgctgtacgagtacttcaccgtgtataacgagctgaccaaagtgaaatacgtgaccgagggaatgagaaagcccgccttcctgagcggcgagcagaaaaaggccatcgtggacctgctgttcaagaccaaccggaaagtgaccgtgaagcagctgaaagaggactacttcaagaaaatcgagtgcttcgactccgtggaaatctccggcgtggaagatcggttcaacgcctccctgggcacataccacgatctgctgaaaattatcaaggacaaggacttcctggacaatgaggaaaacgaggacattctggaagatatcgtgctgaccctgacactgtttgaggacagagagatgatcgaggaacggctgaaaacctatgcccacctgttcgacgacaaagtgatgaagcagctgaagcggcggagatacaccggctggggcaggctgagccggaagctgatcaacggcatccgggacaagcagtccggcaagacaatcctggatttcctgaagtccgacggcttcgccaacagaaacttcatgcagctgatccacgacgacagcctgacctttaaagaggacatccagaaagcccaggtgtccggccagggcgatagcctgcacgagcacattgccaatctggccggcagccccgccattaagaagggcatcctgcagacagtgaaggtggtggacgagctcgtgaaagtgatgggccggcacaagcccgagaacatcgtgatcgaaatggccagagagaaccagaccacccagaagggacagaagaacagccgcgagagaatgaagcggatcgaagagggcatcaaagagctgggcagccagatcctgaaagaacaccccgtggaaaacacccagctgcagaacgagaagctgtacctgtactacctgcagaatgggcgggatatgtacgtggaccaggaactggacatcaaccggctgtccgactacgatgtggaccatatcgtgcctcagagctttctgaaggacgactccatcgacaacaaggtgctgaccagaagcgacaagaaccggggcaagagcgacaacgtgccctccgaagaggtcgtgaagaagatgaagaactactggcggcagctgctgaacgccaagctgattacccagagaaagttcgacaatctgaccaaggccgagagaggcggcctgagcgaactggataaggccggcttcatcaagagacagctggtggaaacccggcagatcacaaagcacgtggcacagatcctggactcccggatgaacactaagtacgacgagaatgacaagctgatccgggaagtgaaagtgatcaccctgaagtccaagctggtgtccgatttccggaaggatttccagttttacaaagtgcgcgagatcaacaactaccaccacgcccacgacgcctacctgaacgccgtcgtgggaaccgccctgatcaaaaagtaccctaagctggaaagcgagttcgtgtacggcgactacaaggtgtacgacgtgcggaagatgatcgccaagagcgagcaggaaatcggcaaggctaccgccaagtacttcttctacagcaacatcatgaactttttcaagaccgagattaccctggccaacggcgagatccggaagcggcctctgatcgagacaaacggcgaaaccggggagatcgtgtgggataagggccgggattttgccaccgtgcggaaagtgctgagcatgccccaagtgaatatcgtgaaaaagaccgaggtgcagacaggcggcttcagcaaagagtctatcctgcccaagaggaacagcgataagctgatcgccagaaagaaggactgggaccctaagaagtacggcggcttcgacagccccaccgtggcctattctgtgctggtggtggccaaagtggaaaagggcaagtccaagaaactgaagagtgtgaaagagctgctggggatcaccatcatggaaagaagcagcttcgagaagaatcccatcgactttctggaagccaagggctacaaagaagtgaaaaaggacctgatcatcaagctgcctaagtactccctgttcgagctggaaaacggccggaagagaatgctggcctctgccggcgaactgcagaagggaaacgaactggccctgccctccaaatatgtgaacttcctgtacctggccagccactatgagaagctgaagggctcccccgaggataatgagcagaaacagctgtttgtggaacagcacaagcactacctggacgagatcatcgagcagatcagcgagttctccaagagagtgatcctggccgacgctaatctggacaaagtgctgtccgcctacaacaagcaccgggataagcccatcagagagcaggccgagaatatcatccacctgtttaccctgaccaatctgggagcccctgccgccttcaagtactttgacaccaccatcgaccggaagaggtacaccagcaccaaagaggtgctggacgccaccctgatccaccagagcatcaccggcctgtacgagacacggatcgacctgtctcagctgggaggtgacagcggcgggagcggcgggagcggggggagcactaatctgagcgacatcattgagaaggagactgggaaacagctggtcattcaggagtccatcctgatgctgcctgaggaggtggaggaagtgatcggcaacaagccagagtctgacatcctggtgcacaccgcctacgacgagtccacagatgagaatgtgatgctgctgacctctgacgcccccgagtataagccttgggccctggtcatccaggattctaacggcgagaataagatcaagatgctgagcggaggatccggaggatctggaggcagcaccaacctgtctgacatcatcgagaaggagacaggcaagcagctggtcatccaggagagcatcctgatgctgcccgaagaagtcgaagaagtgatcggaaacaagcctgagagcgatatcctggtccataccgcctacgacgagagtaccgacgaaaatgtgatgctgctgacatccgacgccccagagtataagccctgggctctggtcatccaggattccaacggagagaacaaaatcaaaatgctgtctggcggctcaaaaagaaccgccgacggcagcgaattcgagcccaagaagaagaggaaagtc

SEQ ID NO: 3722 - DNA, 5559 bp, synthetic construct
  source 1..5559: mol_type = other DNA
atgaaacggacagccgacggaagcgagttcgagtcaccaaagaagaagcggaaagtcagcagtgaaaccggaccagtggcagtggacccaaccctgaggagacggattgagccccatgaatttgaagtgttctttgacccaagggagctgaggaaggagacatgcctgctgtacgagatcaagtggggcacaagccacaagatctggcgccacagctccaagaacaccacaaagcacgtggaagtgaatttcatcgagaagtttacctccgagcggcacttctgcccctctaccagctgttccatcacatggtttctgtcttggagcccttgcggcgagtgttccaaggccatcaccgagttcctgtctcagcaccctaacgtgaccctggtcatctacgtggcccggctgtatcaccacatggaccagcagaacaggcagggcctgcgcgatctggtgaattctggcgtgaccatccagatcatgacagccccagagtacgactattgctggcggaacttcgtgaattatccacctggcaaggaggcacactggccaagatacccacccctgtggatgaagctgtatgcactggagctgcacgcaggaatcctgggcctgcctccatgtctgaatatcctgcggagaaagcagccccagctgacatttttcaccattgctctgcagtcttgtcactatcagcggctgcctcctcatattctgtgggctacaggccttaaatctggaggatctagcggaggatcctctggcagcgagacaccaggaacaagcgagtcagcaacaccagagagcagtggcggcagcagcggcggcagcgacaagaagtacagcatcggcctggacatcggcaccaactctgtgggctgggccgtgatcaccgacgagtacaaggtgcccagcaagaaattcaaggtgctgggcaacaccgaccggcacagcatcaagaagaacctgatcggagccctgctgttcgacagcggcgaaacagccgaggccacccggctgaagagaaccgccagaagaagatacaccagacggaagaaccggatctgctatctgcaagagatcttcagcaacgagatggccaaggtggacgacagcttcttccacagactggaagagtccttcctggtggaagaggataagaagcacgagcggcaccccatcttcggcaacatcgtggacgaggtggcctaccacgagaagtaccccaccatctaccacctgagaaagaaactggtggacagcaccgacaaggccgacctgcggctgatctatctggccctggcccacatgatcaagttccggggccacttcctgatcgagggcgacctgaaccccgacaacagcgacgtggacaagctgttcatccagctggtgcagacctacaaccagctgttcgaggaaaaccccatcaacgccagcggcgtggacgccaaggccatcctgtctgccagactgagcaagagcagacggctggaaaatctgatcgcccagctgcccggcgagaagaagaatggcctgttcggaaacctgattgccctgagcctgggcctgacccccaacttcaagagcaacttcgacctggccgaggatgccaaactgcagctgagcaaggacacctacgacgacgacctggacaacctgctggcccagatcggcgaccagtacgccgacctgtttctggccgccaagaacctgtccgacgccatcctgctgagcgacatcctgagagtgaacaccgagatcaccaaggcccccctgagcgcctctatgatcaagagatacgacgagcaccaccaggacctgaccctgctgaaagctctcgtgcggcagcagctgcctgagaagtacaaagagattttcttcgaccagagcaagaacggctacgccggctacattgacggcggagccagccaggaagagttctacaagttcatcaagcccatcctggaaaagatggacggcaccgaggaactgctcgtgaagctgaacagagaggacctgctgcggaagcagcggaccttcgacaacggcagcatcccccaccagatccacctgggagagctgcacgccattctgcggcggcaggaagatttttacccattcctgaaggacaaccgggaaaagatcgagaagatcctgaccttccgcatcccctactacgtgggccctctggccaggggaaacagcagattcgcctggatgaccagaaagagcgaggaaaccatcaccccctggaacttcgaggaagtggtggacaagggcgcttccgcccagagcttcatcgagcggatgaccaacttcgataagaacctgcccaacgagaaggtgctgcccaagcacagcctgctgtacgagtacttcaccgtgtataacgagctgaccaaagtgaaatacgtgaccgagggaatgagaaagcccgccttcctgagcggcgagcagaaaaaggccatcgtggacctgctgttcaagaccaaccggaaagtgaccgtgaagcagctgaaagaggactacttcaagaaaatcgagtgcttcgactccgtggaaatctccggcgtggaagatcggttcaacgcctccctgggcacataccacgatctgctgaaaattatcaaggacaaggacttcctggacaatgaggaaaacgaggacattctggaagatatcgtgctgaccctgacactgtttgaggacagagagatgatcgaggaacggctgaaaacctatgcccacctgttcgacgacaaagtgatgaagcagctgaagcggcggagatacaccggctggggcaggctgagccggaagctgatcaacggcatccgggacaagcagtccggcaagacaatcctggatttcctgaagtccgacggcttcgccaacagaaacttcatgcagctgatccacgacgacagcctgacctttaaagaggacatccagaaagcccaggtgtccggccagggcgatagcctgcacgagcacattgccaatctggccggcagccccgccattaagaagggcatcctgcagacagtgaaggtggtggacgagctcgtgaaagtgatgggccggcacaagcccgagaacatcgtgatcgaaatggccagagagaaccagaccacccagaagggacagaagaacagccgcgagagaatgaagcggatcgaagagggcatcaaagagctgggcagccagatcctgaaagaacaccccgtggaaaacacccagctgcagaacgagaagctgtacctgtactacctgcagaatgggcgggatatgtacgtggaccaggaactggacatcaaccggctgtccgactacgatgtggaccatatcgtgcctcagagctttctgaaggacgactccatcgacaacaaggtgctgaccagaagcgacaagaaccggggcaagagcgacaacgtgccctccgaagaggtcgtgaagaagatgaagaactactggcggcagctgctgaacgccaagctgattacccagagaaagttcgacaatctgaccaaggccgagagaggcggcctgagcgaactggataaggccggcttcatcaagagacagctggtggaaacccggcagatcacaaagcacgtggcacagatcctggactcccggatgaacactaagtacgacgagaatgacaagctgatccgggaagtgaaagtgatcaccctgaagtccaagctggtgtccgatttccggaaggatttccagttttacaaagtgcgcgagatcaacaactaccaccacgcccacgacgcctacctgaacgccgtcgtgggaaccgccctgatcaaaaagtaccctaagctggaaagcgagttcgtgtacggcgactacaaggtgtacgacgtgcggaagatgatcgccaagagcgagcaggaaatcggcaaggctaccgccaagtacttcttctacagcaacatcatgaactttttcaagaccgagattaccctggccaacggcgagatccggaagcggcctctgatcgagacaaacggcgaaaccggggagatcgtgtgggataagggccgggattttgccaccgtgcggaaagtgctgagcatgccccaagtgaatatcgtgaaaaagaccgaggtgcagacaggcggcttcagcaaagagtctatcctgcccaagaggaacagcgataagctgatcgccagaaagaaggactgggaccctaagaagtacggcggcttcgacagccccaccgtggcctattctgtgctggtggtggccaaagtggaaaagggcaagtccaagaaactgaagagtgtgaaagagctgctggggatcaccatcatggaaagaagcagcttcgagaagaatcccatcgactttctggaagccaagggctacaaagaagtgaaaaaggacctgatcatcaagctgcctaagtactccctgttcgagctggaaaacggccggaagagaatgctggcctctgccggcgaactgcagaagggaaacgaactggccctgccctccaaatatgtgaacttcctgtacctggccagccactatgagaagctgaagggctcccccgaggataatgagcagaaacagctgtttgtggaacagcacaagcactacctggacgagatcatcgagcagatcagcgagttctccaagagagtgatcctggccgacgctaatctggacaaagtgctgtccgcctacaacaagcaccgggataagcccatcagagagcaggccgagaatatcatccacctgtttaccctgaccaatctgggagcccctgccgccttcaagtactttgacaccaccatcgaccggaagaggtacaccagcaccaaagaggtgctggacgccaccctgatccaccagagcatcaccggcctgtacgagacacggatcgacctgtctcagctgggaggtgacagcggcgggagcggcgggagcggggggagcactaatctgagcgacatcattgagaaggagactgggaaacagctggtcattcaggagtccatcctgatgctgcctgaggaggtggaggaagtgatcggcaacaagccagagtctgacatcctggtgcacaccgcctacgacgagtccacagatgagaatgtgatgctgctgacctctgacgcccccgagtataagccttgggccctggtcatccaggattctaacggcgagaataagatcaagatgctgagcggaggatccggaggatctggaggcagcaccaacctgtctgacatcatcgagaaggagacaggcaagcagctggtcatccaggagagcatcctgatgctgcccgaagaagtcgaagaagtgatcggaaacaagcctgagagcgatatcctggtccataccgcctacgacgagagtaccgacgaaaatgtgatgctgctgacatccgacgccccagagtataagccctgggctctggtcatccaggattccaacggagagaacaaaatcaaaatgctgtctggcggctcaaaaagaaccgccgacggcagcgaattcgagcccaagaagaagaggaaagtc

SEQ ID NO: 3723 - DNA, 5559 bp, synthetic construct
  source 1..5559: mol_type = other DNA
atgaaacggacagccgacggaagcgagttcgagtcaccaaagaagaagcggaaagtctcatcagaaacaggaccagtcgccgtggacccaacactgaggagaaggattgagccccatgaatttgaagtctttttcgaccccagggagctgaggaaggaggcatgcctgctgtacgagatcaagtggggcacaagccacaagatctggcgcaacagcggcaagaacaccacaaagcacgtggaagtgaatttcatcgagaagtttacctccgagcggcacttctgcccctctatcagctgttccatcacatggtttctgtcttggagcccttgctgggagtgttccaaggccatccgcgagttcctgtctcagcaccctaacgtgaccctggtcatctacgtggcccggctgtttcaacacatggaccagcagaacaggcagggcctgcgcgatctggtgaattctggcgtgaccatccagatcatgacagcctcagagtacgaccattgctggcggaacttcgtgaattatccacctggcaaggaggcacactggccaagatacccacccctgtggatgaagctgtatgcactggagctgcacgcaggaatcctgggcctgcctccatgtctgaatatcctgcggagaaagcagccccagctgacatttttcactatcgcactgcagagctgtcattaccagagactgcctcctcatatcctgtgggctacaggccttaaatctggaggatctagcggaggatcctctggcagcgagacaccaggaacaagcgagtcagcaacaccagagagcagtggcggcagcagcggcggcagcgacaagaagtacagcatcggcctggacatcggcaccaactctgtgggctgggccgtgatcaccgacgagtacaaggtgcccagcaagaaattcaaggtgctgggcaacaccgaccggcacagcatcaagaagaacctgatcggagccctgctgttcgacagcggcgaaacagccgaggccacccggctgaagagaaccgccagaagaagatacaccagacggaagaaccggatctgctatctgcaagagatcttcagcaacgagatggccaaggtggacgacagcttcttccacagactggaagagtccttcctggtggaagaggataagaagcacgagcggcaccccatcttcggcaacatcgtggacgaggtggcctaccacgagaagtaccccaccatctaccacctgagaaagaaactggtggacagcaccgacaaggccgacctgcggctgatctatctggccctggcccacatgatcaagttccggggccacttcctgatcgagggcgacctgaaccccgacaacagcgacgtggacaagctgttcatccagctggtgcagacctacaaccagctgttcgaggaaaaccccatcaacgccagcggcgtggacgccaaggccatcctgtctgccagactgagcaagagcagacggctggaaaatctgatcgcccagctgcccggcgagaagaagaatggcctgttcggaaacctgattgccctgagcctgggcctgacccccaacttcaagagcaacttcgacctggccgaggatgccaaactgcagctgagcaaggacacctacgacgacgacctggacaacctgctggcccagatcggcgaccagtacgccgacctgtttctggccgccaagaacctgtccgacgccatcctgctgagcgacatcctgagagtgaacaccgagatcaccaaggcccccctgagcgcctctatgatcaagagatacgacgagcaccaccaggacctgaccctgctgaaagctctcgtgcggcagcagctgcctgagaagtacaaagagattttcttcgaccagagcaagaacggctacgccggctacattgacggcggagccagccaggaagagttctacaagttcatcaagcccatcctggaaaagatggacggcaccgaggaactgctcgtgaagctgaacagagaggacctgctgcggaagcagcggaccttcgacaacggcagcatcccccaccagatccacctgggagagctgcacgccattctgcggcggcaggaagatttttacccattcctgaaggacaaccgggaaaagatcgagaagatcctgaccttccgcatcccctactacgtgggccctctggccaggggaaacagcagattcgcctggatgaccagaaagagcgaggaaaccatcaccccctggaacttcgaggaagtggtggacaagggcgcttccgcccagagcttcatcgagcggatgaccaacttcgataagaacctgcccaacgagaaggtgctgcccaagcacagcctgctgtacgagtacttcaccgtgtataacgagctgaccaaagtgaaatacgtgaccgagggaatgagaaagcccgccttcctgagcggcgagcagaaaaaggccatcgtggacctgctgttcaagaccaaccggaaagtgaccgtgaagcagctgaaagaggactacttcaagaaaatcgagtgcttcgactccgtggaaatctccggcgtggaagatcggttcaacgcctccctgggcacataccacgatctgctgaaaattatcaaggacaaggacttcctggacaatgaggaaaacgaggacattctggaagatatcgtgctgaccctgacactgtttgaggacagagagatgatcgaggaacggctgaaaacctatgcccacctgttcgacgacaaagtgatgaagcagctgaagcggcggagatacaccggctggggcaggctgagccggaagctgatcaacggcatccgggacaagcagtccggcaagacaatcctggatttcctgaagtccgacggcttcgccaacagaaacttcatgcagctgatccacgacgacagcctgacctttaaagaggacatccagaaagcccaggtgtccggccagggcgatagcctgcacgagcacattgccaatctggccggcagccccgccattaagaagggcatcctgcagacagtgaaggtggtggacgagctcgtgaaagtgatgggccggcacaagcccgagaacatcgtgatcgaaatggccagagagaaccagaccacccagaagggacagaagaacagccgcgagagaatgaagcggatcgaagagggcatcaaagagctgggcagccagatcctgaaagaacaccccgtggaaaacacccagctgcagaacgagaagctgtacctgtactacctgcagaatgggcgggatatgtacgtggaccaggaactggacatcaaccggctgtccgactacgatgtggaccatatcgtgcctcagagctttctgaaggacgactccatcgacaacaaggtgctgaccagaagcgacaagaaccggggcaagagcgacaacgtgccctccgaagaggtcgtgaagaagatgaagaactactggcggcagctgctgaacgccaagctgattacccagagaaagttcgacaatctgaccaaggccgagagaggcggcctgagcgaactggataaggccggcttcatcaagagacagctggtggaaacccggcagatcacaaagcacgtggcacagatcctggactcccggatgaacactaagtacgacgagaatgacaagctgatccgggaagtgaaagtgatcaccctgaagtccaagctggtgtccgatttccggaaggatttccagttttacaaagtgcgcgagatcaacaactaccaccacgcccacgacgcctacctgaacgccgtcgtgggaaccgccctgatcaaaaagtaccctaagctggaaagcgagttcgtgtacggcgactacaaggtgtacgacgtgcggaagatgatcgccaagagcgagcaggaaatcggcaaggctaccgccaagtacttcttctacagcaacatcatgaactttttcaagaccgagattaccctggccaacggcgagatccggaagcggcctctgatcgagacaaacggcgaaaccggggagatcgtgtgggataagggccgggattttgccaccgtgcggaaagtgctgagcatgccccaagtgaatatcgtgaaaaagaccgaggtgcagacaggcggcttcagcaaagagtctatcctgcccaagaggaacagcgataagctgatcgccagaaagaaggactgggaccctaagaagtacggcggcttcgacagccccaccgtggcctattctgtgctggtggtggccaaagtggaaaagggcaagtccaagaaactgaagagtgtgaaagagctgctggggatcaccatcatggaaagaagcagcttcgagaagaatcccatcgactttctggaagccaagggctacaaagaagtgaaaaaggacctgatcatcaagctgcctaagtactccctgttcgagctggaaaacggccggaagagaatgctggcctctgccggcgaactgcagaagggaaacgaactggccctgccctccaaatatgtgaacttcctgtacctggccagccactatgagaagctgaagggctcccccgaggataatgagcagaaacagctgtttgtggaacagcacaagcactacctggacgagatcatcgagcagatcagcgagttctccaagagagtgatcctggccgacgctaatctggacaaagtgctgtccgcctacaacaagcaccgggataagcccatcagagagcaggccgagaatatcatccacctgtttaccctgaccaatctgggagcccctgccgccttcaagtactttgacaccaccatcgaccggaagaggtacaccagcaccaaagaggtgctggacgccaccctgatccaccagagcatcaccggcctgtacgagacacggatcgacctgtctcagctgggaggtgacagcggcgggagcggcgggagcggggggagcactaatctgagcgacatcattgagaaggagactgggaaacagctggtcattcaggagtccatcctgatgctgcctgaggaggtggaggaagtgatcggcaacaagccagagtctgacatcctggtgcacaccgcctacgacgagtccacagatgagaatgtgatgctgctgacctctgacgcccccgagtataagccttgggccctggtcatccaggattctaacggcgagaataagatcaagatgctgagcggaggatccggaggatctggaggcagcaccaacctgtctgacatcatcgagaaggagacaggcaagcagctggtcatccaggagagcatcctgatgctgcccgaagaagtcgaagaagtgatcggaaacaagcctgagagcgatatcctggtccataccgcctacgacgagagtaccgacgaaaatgtgatgctgctgacatccgacgccccagagtataagccctgggctctggtcatccaggattccaacggagagaacaaaatcaaaatgctgtctggcggctcaaaaagaaccgccgacggcagcgaattcgagcccaagaagaagaggaaagtc

SEQ ID NO: 3724 - protein, 228 aa, synthetic construct
SSETGPVAVDPTLRRRIEPHEFEVFFDPRELRKETCLLYEINWGGRHSIWRHTSQNTNKHVEVNFIEKFTTERYFCPNTRCSITWFLSWSPCGECSRAITEFLSRYPHVTLFIYIARLYHHADPRNRQGLRDLISSGVTIQIMTEQESGYCWRNFVNYSPSNEAHWPRYPHLWVRLYVLELYCIILGLPPCLNILRRKQPQLTFFTIALQSCHYQRLPPHILWATGLK

SEQ ID NO: 3725 - protein, 228 aa, synthetic construct
SSETGPVAVDPTLRRRIEPEFFNRNYDPRELRKETYLLYEIKWGKESKIWRHTSNNRTQHAEVNFLENFFNELYFNPSTHCSITWFLSWSPCGECSKAIVEFLKEHPNVNLEIYVARLYLCEDERNRQGLRDLVNSGVTIRIMNLPDYNYCWRTFVSHQGGDEDYWPRHFAPWVRLYVLELYCIILGLPPCLNILRRKQPQLTFFTIALQSCHYQRLPPHILWATGLK

SEQ ID NO: 3726 - protein, 384 aa, synthetic construct
MKPHFRNTVERMYRDTFSYNFYNRPILSRRNTVWLCYEVKTKGPSRPPLDAKIFRGQVYSELKYHPEMRFFHWFSKWRKLHRDQEYEVTWYISWSPCTKCTRDMATFLAEDPKVTLTIFVARLYYFWDPDYQEALRSLCQKRDGPRATMKIMNYDEFQHCWSKFVYSQRELFEPWNNLPKYYILLHIMLGEILRHSMDPPTFTFNFNNEPWVRGRHETYLCYEVERMHNDTWVLLNQRRGFLCNQAPHKHGFLEGRHAELCFLDVIPFWKLDLDQDYRVTCFTSWSPCFSCAQEMAKFISKNKHVSLCIFTARIYRRQGRCQEGLRTLAEAGAKISIMTYSEFKHCWDTFVDHQGCPFQPWDGLDEHSQDLSGRLRAILQNQEN

SEQ ID NO: 3727 - protein, 184 aa, synthetic construct
MDPPTFTFNFNNEPWVRGRHETYLCYEVERMHNDTWVLLNQRRGFLCNQAPHKHGFLEGRHAELCFLDVIPFWKLDLDQDYRVTCFTSWSPCFSCAQEMAKFISKNKHVSLCIFTARIYDDQGRCQEGLRTLAEAGAKISIMTYSEFKHCWDTFVDHQGCPFQPWDGLDEHSQDLSGRLRAILQ

SEQ ID NO: 3728 - protein, 184 aa, synthetic construct
MDPPTFTFNFNNEPWVRGRHETYLCYEVERMHNDTWVLLNQRRGFLCNQAPHKHGFLEGRHAELCFLDVIPFWKLDLDQDYRVTCFTSWSPCFSCAQEMAKFISKNKHVSLCIFTARIYRRQGRCQEGLRTLAEAGAKISIMTYSEFKHCWDTFVDHQGCPFQPWDGLDEHSQDLSGRLRAILQ

SEQ ID NO: 3729 - protein, 428 aa, Mus sp.
MGPFCLGCSHRKCYSPIRNLISQETFKFHFKNLGYAKGRKDTFLCYEVYRKOCOSPVSLHHGVFKNKONIHAEICFLYWFHDKVLKVLSPREEFKITWYMSWSPCFECAEQIVRFLATHHNLSLDIFSSRLYNVQDPETQQNLCRLVQEGAQVAAMDLYEFKKCWKKFVDNGGRRFRPWKRLLTNFRYQDSKLQEILRPCYIPVPSSSSSTLSNICLTKGLPETRFCVEGRRMDPLSEEEFYSQFYNQRVKHLCYYHRMKPYLCYQLEQFNGQAPLKGCLLSEKGKQHAEILFLDKIRSMELSQVTITCYLTWSPCPNCAWQLAAFKRORPOULHIATSRLYFHWKRPFQKGLCSLWQSGILVDVMDLPQFTDCWTNFVNPKRPFWPWKGLEIISRRTQRRLRRIKESWGLQDLVNDFGNLQLGPPMS

SEQ ID NO: 3730 - protein, 429 aa, Rattus sp.
MGPFCLGCSHRKCYSPIRNLISQETFKFHFKNLRYAIDRKDTFLCYEVTRKDCDSPVSLHHGVFKNKDNIHAEICFLYWFHDKVLKVLSPREEFKITWYMSWSPCFECAEQVLRFLATHHNLSLDIFSSRLYNIRDPENQQNLCRLVQEGAQVAAMDLYEFKKCWKKFVDNGGRRFRPWKKLLTNFRYQDSKLQEILRPCYIPVPSSSSSTLSNICLTKGLPETRFCVERRRVHLLSEEEFYSQFYNQRVKHLCYYHGVKPYLCYQLEQFNGQAPLKGCLLSEKGKQHAEILFLDKIRSMELSQVIITCYLTWSPCPNCAWQLAAFKRDRPDLILHIYTSRLYFHWKRPFQKGLCSLWQSGILVDVMDLPQFTDCWTNFVNPKRPFWPWKGLEIISRRTQRRLHRIKESWGLQDLVNDFGNLQLGPPMS

SEQ ID NO: 3731 - protein, 370 aa, Macaca mulatta; identical to SEQ ID NO: 33

SEQ ID NO: 3732 - protein, 384 aa, Pan troglodytes; identical to SEQ ID NO: 34

SEQ ID NO: 3733 - protein, 377 aa, Chlorocebus sabaeus; identical to SEQ ID NO: 35

SEQ ID NO: 3734 - protein, 384 aa, Homo sapiens; identical to SEQ ID NO: 36

SEQ ID NO: 3735 - protein, 373 aa, Homo sapiens; identical to SEQ ID NO: 32

SEQ ID NO: 3736 - protein, 382 aa, Homo sapiens; identical to SEQ ID NO: 37

SEQ ID NO: 3737 - protein, 396 aa, Rattus sp.
MQPQGLGPNAGMGPVCLGCSHRRPYSPIRNPLKKLYQQTFYFHFKNVRYAWGRKNNFLCYEVNGMDCALPVPLRQGVFRKQGHIHAELCFIYWFHDKVLRVLSPMEEFKVTWYMSWSPCSKCAEQVARFLAAHRNLSLAIFSSRLYYYLRNPNYQQKLCRLIQEGVHVAAMDLPEFKKCWNKFVDNDGQPFRPWMRLRINFSFYDCKLQEIFSRMNLLREDVFYLQFNNSHRVKPVQNRYYRRKSYLCYQLERANGQEPLKGYLLYKKGEQHVEILFLEKMRSMELSQVRITCYLTWSPCPNCARQLAAFKKDHPDLILRIYTSRLYFYWRKKFQKGLCTLWRSGIHVDVMDLPQFADCWTNFVNPQRPFRPWNELEKNSWRIQRRLRRIKESWGL

SEQ ID NO: 3738 - protein, 227 aa, Bos sp.
DGWEVAFRSGTVLKAGVLGVSMTEGWAGSGHPGQGACVWTPGTRNTMNLLREVLFKQQFGNQPRVPAPYYRRKTYLCYQLKQRNDLTLDRGCFRNKKQRHAEIRFIDKINSLDLNPSQSYKIICYITWSPCPNCANELVNFITRNNHLKLEIFASRLYFHWIKSFKMGLQDLQNAGISVAVMTHTEFEDCWEQFVDNQSRPFQPWDKLEQYSASIRRRLQRILTAPI

SEQ ID NO: 3739 - protein, 490 aa, Pan troglodytes; identical to SEQ ID NO: 40

SEQ ID NO: 3740 - protein, 190 aa, Gorilla sp.
MNPQIRNPMKAMYPGTFYFQFKNLWEANDRNETWLCFTVEGIKRRSVVSWKTGVFRNQVDSETHCHAERCFLSWFCDDILSPNTNYQVTWYTSWSPCPECAGEVAEFLARHSNVNLTIFTARLYYFQDTDYQEGLRSLSQEGVAVKIMDYKDFKYCWENFVYNDDEPFKPWKGLKYNFRFLKRRLQEILE

SEQ ID NO: 3741 - protein, 199 aa, Homo sapiens
MEASPASGPRHLMDPHIFTSNFNNGIGRHKTYLCYEVERLDNGTSVKMOQHRGEEHNQAKNEECGEAGRHAELRFLDLVPSLQLDPAQIYRVTWFISWSPCFSWGCAGEVRAFLQENTHVRLRIFAARIYDYDPLYKEALQMLRDAGAQVSIMTYDEFKHCWDTFVDHQGCPFQPWDGLDEHSQALSGRLRAILQNQGN

SEQ ID NO: 3742 - protein, 202 aa, Macaca mulatta
MDGSPASRPRHLMDPNTFTFNFNNDLSVRGRHQTYLCYEVERLDNGTWVPMDERRGEECNKAKNNPCGOAGCHVELRFLCEVPSWQLDPAQTYRVTWFISWSPCERRGCAGQVRVFLQENKHVRLRIFAARIYDYDPLYQEALRTLRDAGAQVSIMTYEEFKHCWDTFVDRQGRPFQPWDGLDEHSQALSGRLRAILQNQGN

SEQ ID NO: 3743 - protein, 184 aa, Bos sp.
MDEYTFTENFNNQGWPSKTYLCYEMERLDGDATIPLDEYKGFVRNKGLDQPEKPCAELYFLGKIHSWNLDRNQHYRLTCFISWSPCAOCAQKEEEEEKENHHISUIIEASRIAEHNRFGCHQSGLCELQAAGARITIMTFEDFKHCWETFVDHKGKPFQPWEGLNVKSQALCTELQAILKTQQN

SEQ ID NO: 3744 - protein, 201 aa, Homo sapiens
MALLTAETFRLQFNNKRRLRRPYYPRKALLCYQLTPQNGSTPTRGYFENKKKCHAEICFINEIKSMGLDETQCYQVTCYLTYVSPCSSCAWEENOEIKAHOHENEGIEASRLYYHWCKPQQKGLRLLCGSQVPVEVMGFPKFADCWENFVDHEKPLSFNPYKMLEELDKNSRAIKRRLERIKIPGVRAQGRYMDILCDAEV

SEQ ID NO: 3745 - protein, 380 aa, Homo sapiens
MNPQIRNPMERMYRDTFYDNFENEPILYGRSYTWLCYEVKIKRGRSNEEWDEGNERGPNEPKRQSNHRQENYERFENHAEMCFLSWFCGNRLPANRRFQITWFVSWPCLPCVVKVTKFLAEHPNVTLTISAARLYYYRDRDWRWVLLRLHKAGARVKIMDYEDFAYCWENFVCNEGQPFMPWYKFDDNYASLHRTLKEILRNPMEAMYPHIFYFHFKNLLKACGRNESWLCFTMEVTKHHSAVFRKRGVFRNQVDPETHCAEPCFLSWFCDDLSPIYPVFEMMWSPCPECAGEVAEFLARHSNVNLTIFTARLCYFWDTDYQEGLCSLSQEGASVKIMGYKDFVSCWKNFVYSDDEPFKPWKGLQTNFRLLKRRLREILQ

SEQ ID NO: 3746 - protein, 228 aa, Rattus sp.
SSETGPVAVDPTLRRRIEPHEFEVFFDPRELRKETCLLYEINWGGRHSIWRHTSQNTNKHVEVNFIEKFTTERYFCPNTRCSRRWFLSWSPCGECSRAITEFLSRYPHVTLFIYIARLYHHADPRNRQGLRDLISSGVTIQIMTEQESGYCWRNFVNYSPSNEAHWPRYPHLWVRLYVLELYCIILGLPPCLNILRRKQPQLTFFTIALQSCHYQRLPPHILWATGLK

SEQ ID NO: 3747 - protein, 228 aa, synthetic construct
SSETGPVAVDPTLRRRIEPHEFEVFFDPRELRKETCLLYEIKWGTSHKIWRHSSKNTTKHVEVNFIEKFTSERHFCPSTSCSITWFLSWSPCGECSKAITEFLSQHPNVTLVIYVARLYHHMDQQNRQGLRDLVNSGVTIQIMTAPEYDYCWRNFVNYPPGKEAHWPRYPPLWMKLYALELHAGILGLPPCLNILRRKQPQLTFFTIALQSCHYQRLPPHILWATGLK

SEQ ID NO: 3748 - protein, 228 aa, synthetic construct
SSETGPVAVDPTLRRRIEPHEFEVFFDPRELRKEACLLYEIKWGTSHKIWRNSGKNTTKHVEVNFIEKFTSERHFCPSISCSITWFLSWSPCWECSKAIREFLSQHPNVTLVIYVARLFQHMDQQNRQGLRDLVNSGVTIQIMTASEYDHCWRNFVNYPPGKEAHWPRYPPLWMKLYALELHAGILGLPPCLNILRRKQPQLTFFTIALQSCHYQRLPPHILWATGLK

SEQ ID NO: 3749 - protein, 228 aa, synthetic construct
SSETGPVAVDPTLRRRIEPEFFNRNYDPRELRKETYLLYEIKWGKESKIWRHTSNNRTQHAEVNFLENFFNELYFNPSTHCSRRWFLSWSPCGECSKAIVEFLKEHPNVNLEIYVARLYLCEDERNRQGLRDLVNSGVTIRIMNLPDYNYCWRTFVSHQGGDEDYWPRHFAPWVRLYVLELYCIILGLPPCLNILRRKQPQLTFFTIALQSCHYQRLPPHILWATGLK

SEQ ID NO: 3750 - protein, 228 aa, synthetic construct
SSETGPVAVDPTLRRRIEPFYFQFNNDPRACRRKTYLCYELKQDGSTWVWKRTLHNKGRHAEICFLEKISSLEKLDPAQHYRITWYMSWSPCSNCAQKIVDFLKEHPHVNLRIYVARLYYHEEERYQEGLRNLRRSGVSIRVMDLPDFEHCWETFVDNGGGPFQPWPGLEELNSKQLSRRLQAGILGLPPCLNILRRKQPQLTFFTIALQSCHYQRLPPHILWATGLK

SEQ ID NO: 3751 - protein, 228 aa, synthetic construct
SSETGPVAVDPTLRRRIEPFHFQFNNDPRAYRRKTYLCYELKQDGSTWVLDRTLRNKGRHAEICFLDKINSWERLDPAQHYRVTWYMSWSPCSNCAQQVVDFLKEHPHVNLRIFAARLYYHEQRRYQEGLRSLRGSGVPVAVMTLPDFEHCWETFVDHGGRPFQPWDGLEELNSRSLSRRLQAGILGLPPCLNILRRKQPQLTFFTIALQSCHYQRLPPHILWATGLK

SEQ ID NO: 3752 - protein, 12 aa, synthetic construct
EGSSSKEEEEPG

SEQ ID NO: 3753 - protein, 10 aa, synthetic construct
NSISSSNGQK

SEQ ID NO: 3754 - protein, 12 aa, synthetic construct
GEEGEGSGGGEK

SEQ ID NO: 3755 - protein, 12 aa, synthetic construct
EGEGGKESGSSE

SEQ ID NO: 3756 - protein, 12 aa, synthetic construct
GGGGSSKSPGSE

SEQ ID NO: 3757 - protein, 8 aa, synthetic construct
PIGSDQDD

SEQ ID NO: 3758 - protein, 10 aa, synthetic construct
TEKGQVPHGS

SEQ ID NO: 3759 - protein, 12 aa, synthetic construct
ESGEGGGGSEKK

SEQ ID NO: 3760 - protein, 12 aa, synthetic construct
EEGKPKEGEGSG

SEQ ID NO: 3761 - protein, 9 aa, synthetic construct
ASREPKDSS

SEQ ID NO: 3762 - protein, 8 aa, synthetic construct
KQGSEHDE

SEQ ID NO: 3763 - protein, 12 aa, synthetic construct
SESKSEKGSSEK

SEQ ID NO: 3764 - protein, 10 aa, synthetic construct
QYDSGERSDQ

SEQ ID NO: 3765 - protein, 10 aa, synthetic construct
PGANEEIPGQ

SEQ ID NO: 3766 - protein, 7 aa, synthetic construct
NSPTDEK

SEQ ID NO: 3767 - protein, 10 aa, synthetic construct
EGANEEIPGQ

SEQ ID NO: 3768 - protein, 12 aa, synthetic construct
EGEKEKKKSGES

SEQ ID NO: 3769 - protein, 10 aa, synthetic construct
PGRHEEVPGQ

SEQ ID NO: 3770 - protein, 10 aa, synthetic construct
SKHQTEQDDS

SEQ ID NO: 3771 - protein, 10 aa, synthetic construct
ESEDDSSGRK

SEQ ID NO: 3772 - protein, 12 aa, synthetic construct
KESEKKESESKS

SEQ ID NO: 3773 - protein, 10 aa, synthetic construct
KGEGKSSIKD

SEQ ID NO: 3774 - protein, 10 aa, synthetic construct
DRSQKQDQQD

SEQ ID NO: 3775 - protein, 8 aa, synthetic construct
GPSSTSSS

SEQ ID NO: 3776 - protein, 12 aa, synthetic construct
GSSGEKEEGEPS

SEQ ID NO: 3777 - protein, 12 aa, synthetic construct
GEPKSKKSGSGS

SEQ ID NO: 3778 - protein, 12 aa, synthetic construct
SSGEGGKSESGP

SEQ ID NO: 3779 - protein, 8 aa, synthetic construct
SPQPTSSD

SEQ ID NO: 3780 - protein, 12 aa, synthetic construct
EGGSEEEEESGS

SEQ ID NO: 3781 - protein, 12 aa, synthetic construct
KGPKPKKEESEK

SEQ ID NO: 3782 - protein, 10 aa, synthetic construct
SKSQQFVTYE

SEQ ID NO: 3783 - protein, 10 aa, synthetic construct
TGNSKYQTGK

SEQ ID NO: 3784 - protein, 10 aa, synthetic construct
PQPIPHTNPT

SEQ ID NO: 3785 - protein, 10 aa, synthetic construct
ANAHSDISTG

SEQ ID NO: 3786 - protein, 10 aa, synthetic construct
KSQQTEDQSK

SEQ ID NO: 3787 - protein, 10 aa, synthetic construct
QSQDQKQKEH

SEQ ID NO: 3788 - protein, 8 aa, synthetic construct
NQQRPSSD

SEQ ID NO: 3789 - protein, 10 aa, synthetic construct
TTKDTSPKPQ

SEQ ID NO: 3790 - protein, 10 aa, synthetic construct
EGKDNQQTGE

SEQ ID NO: 3791 - protein, 8 aa, synthetic construct
EPQPDSSE

SEQ ID NO: 3792 - DNA, 23 bp, synthetic construct
  source 1..23: mol_type = other DNA
gcttacaatgactgagatcttgg

SEQ ID NO: 3793 - DNA, 24 bp, synthetic construct
  source 1..24: mol_type = other DNA
tgcttacaatgactgagatcttgg

SEQ ID NO: 3794 - RNA, 20 nt, synthetic construct
  source 1..20: mol_type = other RNA
caggatccgcacagactcca

SEQ ID NO: 3795 - DNA, 23 bp, synthetic construct
  source 1..23: mol_type = other DNA
caggatccgcacagactccaggg

SEQ ID NO: 3796 - RNA, 20 nt, synthetic construct
  source 1..20: mol_type = other RNA
tccccgttctcgaagtcgtg

SEQ ID NO: 3797 - DNA, 23 bp, synthetic construct
  source 1..23: mol_type = other DNA
tccccgttctcgaagtcgtgtgg